(19) United States
(12) Patent Application Publication
(10) Pub. No.: US 2021/0269782 A1
(43) Pub. Date: Sep. 2, 2021

(54) RNA-GUIDED EFFECTOR PROTEINS AND METHODS OF USE THEREOF

(71) Applicant: The Regents of the University of California, Oakland, CA (US)

(72) Inventors: Jennifer A. Doudna, Berkeley, CA (US); David Frank Savage, Berkeley, CA (US); Sean A. Higgins, Berkeley, CA (US); Benjamin L. Oakes, Berkeley, CA (US)

(21) Appl. No.: 17/057,531

(22) PCT Filed: Jun. 25, 2019
(86) PCT No.: PCT/US19/39041

§ 371 Date: Nov. 20, 2020

Related U.S. Application Data
(60) Provisional application No. 62/690,282, filed on Jun. 26, 2018.

(51) Int. Cl. C12N 9/22; C12N 15/11; C07K 19/00

(52) U.S. Cl. CPC C12N 9/22; C12N 2310/20; C07K 19/00; C12N 15/11

(57) ABSTRACT

The present disclosure provides an RNA-guided effector polypeptide having a length that is less than Streptococcus pyogenes Cas9, and that retains the ability, when complexed with a guide RNA, to bind to a target nucleic acid. The present disclosure provides a fusion polypeptide comprising: i) an RNA-guided effector polypeptide of the present disclosure; and ii) a fusion partner. The present disclosure further provides nucleic acids encoding an RNA-guided effector polypeptide, or a fusion polypeptide, of the present disclosure. Methods of using an RNA-guided effector polypeptide, or a fusion polypeptide, of the present disclosure are also provided.

### CROSS-REFERENCE

[0001] This application claims the benefit of U.S. Provisional Patent Application No. 62/690,282, filed Jun. 26, 2018, which application is incorporated herein by reference in its entirety.

### STATEMENT REGARDING FEDERALLY SPONSORED RESEARCH

[0002] This invention was made with government support under EB018658 awarded by the National Institutes of Health. The government has certain rights in the invention

### INCORPORATION BY REFERENCE OF SEQUENCE LISTING PROVIDED AS A TEXT FILE

[0003] A Sequence Listing is provided herewith as a text file, “BERK-383WO_SEQ_LISTING_ST25.txt” created on Jun. 18, 2019 and having a size of 7,871 KB. The contents of the text file are incorporated by reference herein in their entirety.

### INTRODUCTION

[0004] Bacterial adaptive immune systems employ CRISPRs (clustered regularly interspaced short palindromic repeats) and CRISPR-associated (Cas) proteins for RNA-guided nucleic acid cleavage. The CRISPR-Cas systems thereby confer adaptive immunity in bacteria and archaea via RNA-guided nucleic acid interference. To provide anti-viral immunity, processed CRISPR array transcripts (crRNAs) assemble with Cas protein-containing surveillance complexes that recognize nucleic acids bearing sequence complementarity to the virus derived segment of the crRNAs, known as the spacer.

[0005] Class 2 CRISPR-Cas systems are streamlined versions in which a single Cas protein (an effector protein, e.g., a type V Cas effector protein such as Cpf1) bound to RNA is responsible for binding to and cleavage of a targeted sequence. The programmable nature of these minimal systems has facilitated their use as a versatile technology that continues to revolutionize the field of genome manipulation.

[0006] The physical size of CRISPR-Cas9 proteins can complicate their delivery. There is a need in the art for CRISPR-Cas9 proteins that are smaller than those currently in use.

### SUMMARY

[0007] The present disclosure provides an RNA-guided effector polypeptide having a length that is less than Streptococcus pyogenes Cas9, and that retains the ability, when complexed with a guide RNA, to bind to a target nucleic acid. The present disclosure provides a fusion polypeptide comprising: i) an RNA-guided effector polypeptide of the present disclosure; and ii) a fusion partner. The present disclosure further provides nucleic acids encoding an RNA-guided effector polypeptide, or a fusion polypeptide, of the present disclosure. Methods of using an RNA-guided effector polypeptide, or a fusion polypeptide, of the present disclosure are also provided.

### BRIEF DESCRIPTION OF THE DRAWINGS

[0008] FIG. 1 provide an amino acid sequence of Streptococcus pyogenes Cas9 (Spy Cas9).

[0009] FIG. 2A-2B depict start and end sites of deletions of Cas9.

[0010] FIG. 3 provides the amino acid sequence of D3CE, an example of an RNA-guided effector polypeptide of the present disclosure.

[0011] FIG. 4 provides the amino acid sequence of D4CE, an example of an RNA-guided effector polypeptide of the present disclosure.

[0012] FIG. 5A-5B provide an amino acid sequence alignment of D3CE with Spy Cas9.

[0013] FIG. 6A-6B provide an amino acid sequence alignment of D4CE with Spy Cas9.

[0014] FIGS. 7A and 7B provide amino acid sequences of the catalytic domain of a FokI nuclease (FIG. 7A) and the “Sharkey” FokI variant (FIG. 7B).

[0015] FIG. 8 depicts the frequency of highly functional deletion variants across dCas9 sequence. Shown on the graph are the general locations of the A, B, C, and D deletion variants.

[0016] FIG. 9 depicts the repression activity of examples of RNA-guided effector polypeptides of the present disclosure, where the RNA-guided effector polypeptides are fused to a transcriptional repressor. Indicated in brackets are the boundaries of the deletion(s).

[0017] FIGS. 10A and 10B through FIGS. 22A and 22B provide amino acid sequences of examples of RNA-guided effector polypeptides of the present disclosure.

[0018] FIG. 23 provides deletion sites of RNA-guided effector polypeptides of the present disclosure.

[0019] FIG. 24A-24E depicts the percentage of mCherry positive mammalian cells in a CRISPR interference assay to assess the function of dCas9 variants with deletion sites in mammalian cells.

[0020] FIG. 25 depicts an immunoblotting assay for Flag-tagged MISER-dCas9 or WT-dCas9 KRAB fusion proteins stably expressed in U-251 cells and co-expressing a non-targeting guide (sgNT1).

[0021] FIG. 26 depicts an RNP-based gel shift assay to assess in vitro function of variants dCas9, Δ3CE, and Δ4CE.

[0022] FIG. 27 depicts an immunoblotting assay of variants Δ3CE, and Δ4CE that programmably bind to DNA and are functional in human cells.

### DEFINITIONS

[0023] The terms “polynucleotide” and “nucleic acid,” used interchangeably herein, refer to a polymeric form of nucleotides of any length, either ribonucleotides or deoxyribonucleotides. Thus, terms “polynucleotide” and “nucleic acid” encompass single-stranded DNA; double-stranded DNA; multi-stranded DNA; single-stranded RNA; double-stranded RNA; multi-stranded RNA; genomic DNA; cDNA; DNA-RNA hybrids; and a polymer comprising purine and pyrimidine bases or other natural, chemically or biochemically modified, non-natural, or derivatized nucleotide bases.

[0024] The term “oligonucleotide” refers to a polynucleotide of between 4 and 100 nucleotides of single- or double-stranded nucleic acid (e.g., DNA, RNA, or a modified nucleic acid). However, for the purposes of this disclosure, there is no upper limit to the length of an oligonucleotide. Oligonucleotides are also known as “oligomers” or “oligos” and can be isolated from genes, transcribed (in vitro and/or in vivo), or chemically synthesized. The terms “polynucleotide” and “nucleic acid” should be understood to include, as applicable to the embodiments being described, single-stranded (such as sense or antisense) and double-stranded polynucleotides.

[0025] By “hybridizable” or “complementary” or “substantially complementary” it is meant that a nucleic acid (e.g. RNA, DNA) comprises a sequence of nucleotides that enables it to non-covalently bind, i.e. form Watson-Crick base pairs and/or G/U base pairs, “anneal”, or “hybridize,” to another nucleic acid in a sequence-specific, antiparallel, manner (i.e., a nucleic acid specifically binds to a complementary nucleic acid) under the appropriate in vitro and/or in vivo conditions of temperature and solution ionic strength. Standard Watson-Crick base-pairing includes: adenine/adenosine) (A) pairing with thymidine/thymidine (T), A pairing with uracil/uridine (U), and guanine/guanosine) (G) pairing with cytosine/cytidine (C). In addition, for hybridization between two RNA molecules (e.g., dsRNA), and for hybridization of a DNA molecule with an RNA molecule (e.g., when a DNA target nucleic acid base pairs with a guide RNA, etc.): G can also base pair with U. For example, G/U base-pairing is partially responsible for the degeneracy (i.e., redundancy) of the genetic code in the context of tRNA anti-codon base-pairing with codons in mRNA. Thus, in the context of this disclosure, a G (e.g., of a protein-binding segment (e.g., dsRNA duplex) of a guide RNA molecule; of a target nucleic acid (e.g., target DNA) base pairing with a guide RNA) is considered complementary to both a U and to C. For example, when a G/U base-pair can be made at a given nucleotide position of a protein-binding segment (e.g., dsRNA duplex) of a guide RNA molecule, the position is not considered to be non-complementary, but is instead considered to be complementary.

[0026] Hybridization requires that the two nucleic acids contain complementary sequences, although mismatches between bases are possible. The conditions appropriate for hybridization between two nucleic acids depend on the length of the nucleic acids and the degree of complementarity, variables well known in the art. The greater the degree of complementarity between two nucleotide sequences, the greater the value of the melting temperature (Tm) for hybrids of nucleic acids having those sequences. Typically, the length for a hybridizable nucleic acid is 8 nucleotides or more (e.g., 10 nucleotides or more, 12 nucleotides or more, 15 nucleotides or more, 20 nucleotides or more, 22 nucleotides or more, 25 nucleotides or more, or 30 nucleotides or more).

[0027] It is understood that the sequence of a polynucleotide need not be 100% complementary to that of its target nucleic acid to be specifically hybridizable. Moreover, a polynucleotide may hybridize over one or more segments such that intervening or adjacent segments are not involved in the hybridization event (e.g., a loop structure or hairpin structure, a ‘bulge’, and the like). A polynucleotide can comprise 60% or more, 65% or more, 70% or more, 75% or more, 80% or more, 85% or more, 90% or more, 95% or more, 98% or more, 99% or more, 99.5% or more, or 100% sequence complementarity to a target region within the target nucleic acid sequence to which it will hybridize. For example, an antisense nucleic acid in which 18 of 20 nucleotides of the antisense compound are complementary to a target region, and would therefore specifically hybridize, would represent 90 percent complementarity. The remaining noncomplementary nucleotides may be clustered or interspersed with complementary nucleotides and need not be contiguous to each other or to complementary nucleotides. Percent complementarity between particular stretches of nucleic acid sequences within nucleic acids can be determined using any convenient method. Example methods include BLAST programs (basic local alignment search tools) and PowerBLAST programs (Altschul et al., J. Mol. Biol., 1990, 215, 403-410; Zhang and Madden, Genome Res., 1997, 7, 649-656) or by using the Gap program (Wisconsin Sequence Analysis Package, Version 8 for Unix, Genetics Computer Group, University Research Park, Madison Wis.), e.g., using default settings, which uses the algorithm of Smith and Waterman (Adv. Appl. Math., 1981, 2, 482-489).

[0028] The terms “peptide,” “polypeptide,” and “protein” are used interchangeably herein, and refer to a polymeric form of amino acids of any length, which can include coded and non-coded amino acids, chemically or biochemically modified or derivatized amino acids, and polypeptides having modified peptide backbones.

[0029] “Binding” as used herein (e.g. with reference to an RNA-binding domain of a polypeptide, binding to a target nucleic acid, and the like) refers to a non-covalent interaction between macromolecules (e.g., between a protein and a nucleic acid; between a guide RNA and a target nucleic acid; and the like). While in a state of non-covalent interaction, the macromolecules are said to be “associated” or “interacting” or “binding” (e.g., when a molecule X is said to interact with a molecule Y, it is meant the molecule X binds to molecule Y in a non-covalent manner). Not all components of a binding interaction need be sequence-specific (e.g., contacts with phosphate residues in a DNA backbone), but some portions of a binding interaction may be sequence-specific. Binding interactions are generally characterized by a dissociation constant (K_{d}) of less than 10⁻⁶ M, less than 10⁻⁷ M, less than 10⁻⁸ M, less than 10⁻⁹ M, less than 10⁻¹⁰ M, less than 10⁻¹¹ M, less than 10⁻¹² M, less than 10⁻¹³ M, less than 10⁻¹⁴ M, or less than 10⁻¹⁵ M. “Affinity” refers to the strength of binding, increased binding affinity being correlated with a lower K_{d}.

[0030] By “binding domain” it is meant a protein domain that is able to bind non-covalently to another molecule. A binding domain can bind to, for example, an RNA molecule (an RNA-binding domain) and/or a protein molecule (a protein-binding domain). In the case of a protein having a protein-binding domain, it can in some cases bind to itself (to form homodimers, homotrimers, etc.) and/or it can bind to one or more regions of a different protein or proteins.

[0031] The term “conservative amino acid substitution” refers to the interchangeability in proteins of amino acid residues having similar side chains. For example, a group of amino acids having aliphatic side chains consists of glycine, alanine, valine, leucine, and isoleucine; a group of amino acids having aliphatic-hydroxyl side chains consists of serine and threonine; a group of amino acids having amide containing side chains consisting of asparagine and glutamine; a group of amino acids having aromatic side chains consists of phenylalanine, tyrosine, and tryptophan; a group of amino acids having basic side chains consists of lysine, arginine, and histidine; a group of amino acids having acidic side chains consists of glutamate and aspartate; and a group of amino acids having sulfur containing side chains consists of cysteine and methionine. Exemplary conservative amino acid substitution groups are: valine-leucine-isoleucine, phenylalanine-tyrosine, lysine-arginine, alanine-valine-glycine, and asparagine-glutamine.

[0032] A polynucleotide or polypeptide has a certain percent “sequence identity” to another polynucleotide or polypeptide, meaning that, when aligned, that percentage of bases or amino acids are the same, and in the same relative position, when comparing the two sequences. Sequence identity can be determined in a number of different ways. To determine sequence identity, sequences can be aligned using various methods and computer programs (e.g., BLAST, T-COFFEE, MUSCLE, MAFFT, Phyre2, etc.), available over the world wide web at sites including ncbi(dot)nlm(dot)nili(dot)gov/BLAST, ebi(dot)ac(dot)uk/Tools/msa/tcoffee/, ebi(dot)ac(dot)uk/Tools/msa/muscle/, mafft(dot)cbrc(dot)jp/alignment/software/, www(dot)sbg(dot)bio(dot)ic(dot)ac(dot)uk/˜phyre2/. See, e.g., Altschul et al. (1990), J. Mol. Bioi. 215:403-10.

[0033] The terms “DNA regulatory sequences,” “control elements,” and “regulatory elements,” used interchangeably herein, refer to transcriptional and translational control sequences, such as promoters, enhancers, polyadenylation signals, terminators, protein degradation signals, and the like, that provide for and/or regulate transcription of a non-coding sequence (e.g., guide RNA) or a coding sequence (e.g., protein coding) and/or regulate translation of an encoded polypeptide.

[0034] As used herein, a “promoter sequence” is a DNA regulatory region capable of binding RNA polymerase and initiating transcription of a downstream (3′ direction) coding or non-coding sequence. Eukaryotic promoters will often, but not always, contain “TATA” boxes and “CAT” boxes. Various promoters, including inducible promoters, may be used to drive the various nucleic acids (e.g., vectors) of the present disclosure.

[0035] The term “naturally-occurring” or “unmodified” or “wild type” as used herein as applied to a nucleic acid, a polypeptide, a cell, or an organism, refers to a nucleic acid, polypeptide, cell, or organism that is found in nature.

[0036] “Recombinant,” as used herein, means that a particular nucleic acid (DNA or RNA) is the product of various combinations of cloning, restriction, polymerase chain reaction (PCR) and/or ligation steps resulting in a construct having a structural coding or non-coding sequence distinguishable from endogenous nucleic acids found in natural systems. DNA sequences encoding polypeptides can be assembled from cDNA fragments or from a series of synthetic oligonucleotides, to provide a synthetic nucleic acid which is capable of being expressed from a recombinant transcriptional unit contained in a cell or in a cell-free transcription and translation system. Genomic DNA comprising the relevant sequences can also be used in the formation of a recombinant gene or transcriptional unit. Sequences of non-translated DNA may be present 5′ or 3′ from the open reading frame, where such sequences do not interfere with manipulation or expression of the coding regions, and may indeed act to modulate production of a desired product by various mechanisms (see “DNA regulatory sequences”, below). Alternatively, DNA sequences encoding RNA (e.g., guide RNA) that is not translated may also be considered recombinant. Thus, e.g., the term “recombinant” nucleic acid refers to one which is not naturally occurring, e.g., is made by the artificial combination of two otherwise separated segments of sequence through human intervention. This artificial combination is often accomplished by either chemical synthesis means, or by the artificial manipulation of isolated segments of nucleic acids, e.g., by genetic engineering techniques. Such is usually done to replace a codon with a codon encoding the same amino acid, a conservative amino acid, or a non-conservative amino acid. Alternatively, it is performed to join together nucleic acid segments of desired functions to generate a desired combination of functions. This artificial combination is often accomplished by either chemical synthesis means, or by the artificial manipulation of isolated segments of nucleic acids, e.g., by genetic engineering techniques. When a recombinant polynucleotide encodes a polypeptide, the sequence of the encoded polypeptide can be naturally occurring (“wild type”) or can be a variant (e.g., a mutant) of the naturally occurring sequence. Thus, the term “recombinant” polypeptide does not necessarily refer to a polypeptide whose sequence does not naturally occur. Instead, a “recombinant” polypeptide is encoded by a recombinant DNA sequence, but the sequence of the polypeptide can be naturally occurring (“wild type”) or non-naturally occurring (e.g., a variant, a mutant, etc.). Thus, a “recombinant” polypeptide is the result of human intervention, but may be a naturally occurring amino acid sequence.

[0037] A “vector” or “expression vector” is a replicon, such as plasmid, phage, virus, or cosmid, to which another DNA segment, i.e. an “insert”, may be attached so as to bring about the replication of the attached segment in a cell.

[0038] An “expression cassette” comprises a DNA coding sequence operably linked to a promoter. “Operably linked” refers to a juxtaposition wherein the components so described are in a relationship permitting them to function in their intended manner. For instance, a promoter is operably linked to a coding sequence if the promoter affects its transcription or expression.

[0039] The terms “recombinant expression vector,” or “DNA construct” are used interchangeably herein to refer to a DNA molecule comprising a vector and one insert. Recombinant expression vectors are usually generated for the purpose of expressing and/or propagating the insert(s), or for the construction of other recombinant nucleotide sequences. The insert(s) may or may not be operably linked to a promoter sequence and may or may not be operably linked to DNA regulatory sequences.

[0040] Any given component, or combination of components can be unlabeled, or can be detectably labeled with a label moiety. In some cases, when two or more components are labeled, they can be labeled with label moieties that are distinguishable from one another.

[0041] General methods in molecular and cellular biochemistry can be found in such standard textbooks as Molecular Cloning: A Laboratory Manual, 3rd Ed. (Sambrook et al., HaRBor Laboratory Press 2001); Short Protocols in Molecular Biology, 4th Ed. (Ausubel et al. eds., John Wiley & Sons 1999); Protein Methods (Bollag et al., John Wiley & Sons 1996); Nonviral Vectors for Gene Therapy (Wagner et al. eds., Academic Press 1999); Viral Vectors (Kaplift & Loewy eds., Academic Press 1995); Immunology Methods Manual (I. Lefkovits ed., Academic Press 1997); and Cell and Tissue Culture: Laboratory Procedures in Biotechnology (Doyle & Griffiths, John Wiley & Sons 1998), the disclosures of which are incorporated herein by reference.

[0042] Before the present invention is further described, it is to be understood that this invention is not limited to particular embodiments described, as such may, of course, vary. It is also to be understood that the terminology used herein is for the purpose of describing particular embodiments only, and is not intended to be limiting, since the scope of the present invention will be limited only by the appended claims.

[0043] Where a range of values is provided, it is understood that each intervening value, to the tenth of the unit of the lower limit unless the context clearly dictates otherwise, between the upper and lower limit of that range and any other stated or intervening value in that stated range, is encompassed within the invention. The upper and lower limits of these smaller ranges may independently be included in the smaller ranges, and are also encompassed within the invention, subject to any specifically excluded limit in the stated range. Where the stated range includes one or both of the limits, ranges excluding either or both of those included limits are also included in the invention.

[0044] Unless defined otherwise, all technical and scientific terms used herein have the same meaning as commonly understood by one of ordinary skill in the art to which this invention belongs. Although any methods and materials similar or equivalent to those described herein can also be used in the practice or testing of the present invention, the preferred methods and materials are now described. All publications mentioned herein are incorporated herein by reference to disclose and describe the methods and/or materials in connection with which the publications are cited.

[0045] It must be noted that as used herein and in the appended claims, the singular forms “a,” “an,” and “the” include plural referents unless the context clearly dictates otherwise. Thus, for example, reference to “an RNA-guided effector polypeptide” includes a plurality of such RNA-guided effector polypeptides and reference to “the guide RNA” includes reference to one or more guide RNAs and equivalents thereof known to those skilled in the art, and so forth. It is further noted that the claims may be drafted to exclude any optional element. As such, this statement is intended to serve as antecedent basis for use of such exclusive terminology as “solely,” “only” and the like in connection with the recitation of claim elements, or use of a “negative” limitation.

[0046] It is appreciated that certain features of the invention, which are, for clarity, described in the context of separate embodiments, may also be provided in combination in a single embodiment. Conversely, various features of the invention, which are, for brevity, described in the context of a single embodiment, may also be provided separately or in any suitable sub-combination. All combinations of the embodiments pertaining to the invention are specifically embraced by the present invention and are disclosed herein just as if each and every combination was individually and explicitly disclosed. In addition, all sub-combinations of the various embodiments and elements thereof are also specifically embraced by the present invention and are disclosed herein just as if each and every such sub-combination was individually and explicitly disclosed herein.

[0047] The publications discussed herein are provided solely for their disclosure prior to the filing date of the present application. Nothing herein is to be construed as an admission that the present invention is not entitled to antedate such publication by virtue of prior invention. Further, the dates of publication provided may be different from the actual publication dates which may need to be independently confirmed.

### DETAILED DESCRIPTION

[0048] The present disclosure provide an RNA-guided effector polypeptide having a length that is less than Streptococcus pyogenes Cas9, and that retains the ability, when complexed with a guide RNA, to bind to a target nucleic acid. The present disclosure provides a fusion polypeptide comprising: i) an RNA-guided effector polypeptide of the present disclosure; and ii) a fusion partner. The present disclosure further provides nucleic acids encoding an RNA-guided effector polypeptide, or a fusion polypeptide, of the present disclosure. Methods of using an RNA-guided effector polypeptide, or a fusion polypeptide, of the present disclosure are also provided.

[0049] An RNA-guided effector polypeptide of the present disclosure has a length that is less than Streptococcus pyogenes Cas9 (Spy Cas9). An RNA-guided effector polypeptide that has a length that is less than Spy Cas9 is advantageous. Expression vectors comprising a nucleotide sequence encoding a heterologous polypeptide such as Cas9 have size limitations; such expression vectors can more readily accommodate an RNA-guided effector polypeptide that has a length less than the 1,368-amino acid full-length Spy Cas9. Moreover, a smaller RNA-guided effector polypeptide can serve as a scaffold for a fusion polypeptide comprising the RNA-guided effector polypeptide and a fusion partner, where the fusion partner provides a functionality such as nuclease activity, transcriptional control, base editing, and the like. An expression vector can also accommodate a nucleotide sequence encoding such a fusion polypeptide, due to the smaller size of the RNA-guided effector polypeptide.

### RNA-Guided Effector Polypeptides

[0050] The present disclosure provides an RNA-guided effector polypeptide, where the RNA-guided effector polypeptide has a length that is less than 1,368 amino acids, and than retains the ability, when complexed with a guide RNA, to bind to a target nucleic acid.

[0051] An RNA-guided effector polypeptide of the present disclosure can have a length of from about 700 amino acids to about 1000 amino acids, e.g., from about 700 amino acids (aa) to about 705 aa, from about 705 aa to about 710 aa, from about 710 aa to about 715 aa, from about 715 aa to about 720 aa, from about 720 aa to about 725 aa, from about 725 aa to about 730 aa, from about 730 aa to about 735 aa, from about 735 aa to about 740 aa, from about 740 aa to about 745 aa, from about 745 aa to about 750 aa, from about 750 aa to about 755 aa, from about 755 aa to about 760 aa, from about 760 aa to about 765 aa, from about 765 aa to about 770 aa, from about 770 aa to 7 about 75 aa, from about 775 aa to about 780 aa, from about 780 aa to about 785 aa, from about 85 aa to about 790 aa, from about 790 aa to about 800 aa, from about 800 aa to about 810 aa, from about 810 aa to about 820 aa, from about 820 aa to about 830 aa, from about 830 aa to about 840 aa, from about 840 aa to about 850 aa, from about 850 aa to about 860 aa, from about 860 aa to about 870 aa, from about 870 aa to about 880 aa, from about 880 aa to about 890 aa, from about 890 aa to about 900 aa, from about 900 aa to about 925 aa, from about 925 aa to about 950 aa, from about 950 aa to about 975 aa, from about 975 aa to about 1000 aa.

[0052] In some cases, an RNA-guided effector polypeptide of the present disclosure has a length of from about 750 amino acids to about 950 amino acids. In some cases, an RNA-guided effector polypeptide of the present disclosure has a length of from about 800 amino acids to about 950 amino acids. In some cases, an RNA-guided effector polypeptide of the present disclosure has a length of from about 850 amino acids to about 950 amino acids. In some cases, an RNA-guided effector polypeptide of the present disclosure has a length of from about 850 amino acids to about 1000 amino acids. In some cases, an RNA-guided effector polypeptide of the present disclosure has a length of from about 850 amino acids to about 925 amino acids. In some cases, an RNA-guided effector polypeptide of the present disclosure has a length of from about 850 amino acids to about 900 amino acids. In some cases, an RNA-guided effector polypeptide of the present disclosure has a length of from about 900 amino acids to about 1000 amino acids. In some cases, an RNA-guided effector polypeptide of the present disclosure has a length of from about 950 amino acids to about 1000 amino acids.

[0053] In some cases, an RNA-guided effector polypeptide of the present disclosure has a length of from about 1000 amino acids to about 1200 amino acids, e.g., from about 100 amino acids (aa) to about 1050 aa, from about 1050 aa to about 1100 aa, from about 1100 aa to about 1150 aa, or from about 1150 aa to about 1200 aa. In some cases, an RNA-guided effector polypeptide of the present disclosure has a length of from about 1200 amino acids to about 1364 amino acids, e.g., from about 1200 amino acids (aa) to about 1210 aa, from about 1210 aa to about 1220 aa, from about 1220 aa to about 1230 aa, from about 1230 aa to about 1240 aa, from about 1240 aa to about 1250 aa, from about 1250 aa to about 1260 aa, from about 1260 aa to about 1270 aa, from about 1270 aa to about 1280 aa, from about 1280 aa to about 1290 aa, from about 1290 aa to about 1300 aa, from about 1300 aa to about 1310 aa, from about 1310 aa to about 1320 aa, from about 1320 aa to about 1330 aa, from about 1330 aa to about 1340 aa, from about 1340 aa to about 1350 aa, or from about 1350 aa to about 1365 aa.

[0054] An RNA-guided effector polypeptide of the present disclosure will in some cases exhibit reduced nuclease activity, compared to the nuclease activity exhibited by a Spy Cas9 polypeptide comprising the amino acid sequence depicted in FIG. 1. In some cases, an RNA-guided effector polypeptide of the present disclosure exhibits 50% or less, 40% or less, 30% or less, 25% or less, 20% or less, 15% or less, 10% or less, 5% or less, 2% or less, or 1% or less, of the nuclease activity exhibited by a Spy Cas9 polypeptide comprising the amino acid sequence depicted in FIG. 1. Methods for determining nuclease activity of an RNA-guided effector polypeptide are well known in the art, and any such method can be used to determine whether an RNA-guided effector polypeptide of the present disclosure exhibits reduced nuclease activity, compared to the nuclease activity exhibited by a Spy Cas9 polypeptide comprising the amino acid sequence depicted in FIG. 1. In some cases, an RNA-guided effector polypeptide of the present disclosure does not exhibit detectable nuclease activity.

[0055] An RNA-guided effector polypeptide of the present disclosure, when complexed with a guide RNA, retains the ability to bind to a target nucleic acid, where the guide RNA comprises a nucleotide sequence that is complementary to a nucleotide sequence in the target nucleic acid. In some cases, an RNA-guided effector polypeptide of the present disclosure, when complexed with a guide RNA, exhibits at least 50%, at least 60%, at least 70%, at least 80%, at least 90%, at least 95%, or more than 95%, of the binding affinity for a target nucleic acid of a Spy Cas9 polypeptide comprising the amino acid sequence depicted in FIG. 1, when complexed with the same guide RNA, to the same target nucleic acid.

[0056] In some cases, an RNA-guided effector polypeptide of the present disclosure comprises 1, 2, 3, or 4 deletions, relative to a Cas9 polypeptide having at least 50%, at least 60%, at least 70%, at least 80%, at least 85%, at least 90%, at least 95%, at least 98%, at least 99%, or 100%, amino acid sequence identity to the Spy Cas9 amino acid sequence depicted in FIG. 1. Each of the 1, 2, 3, or 4 deletions can be from 4 contiguous amino acids to 255 contiguous amino acids in length.

[0057] In some cases, RNA-guided effector polypeptide of the present disclosure comprises one or more of:

[0058] i) a deletion of from 5 contiguous amino acids to 158 contiguous amino acids of amino acids 166-324 (referred to herein as an “A” deletion);

[0059] ii) a deletion of from 30 contiguous amino acids to 255 contiguous amino acids of amino acids 484-739 (referred to herein as a “B” deletion);

[0060] iii) a deletion of from 4 contiguous amino acids to 220 contiguous amino acids of amino acids 761-981 (referred to herein as a “C” deletion); and

[0061] d) a deletion of from 20 contiguous amino acids to 118 contiguous amino acids of amino acids 994-1112 (referred to herein as a “D” deletion),

[0062] where the amino acid numbering is based on the amino acid numbering of the Spy Cas9 amino acid sequence depicted in FIG. 1. An RNA-guided effector polypeptide of the present disclosure can comprise one or more stretches of from 50 to 1000 contiguous amino acids (e.g., from 50 to 75, from 75 to 100, from 100 to 150, from 150 to 200, from 200 to 250, from 250 to 300, from 300 to 350, from 350 to 400, from 400 to 450, from 450 to 500, from 500 to 600, from 600 to 700, from 700 to 800, from 800 to 900, or from 900 to 1000, contiguous amino acids) having at least 50%, at least 60%, at least 70%, at least 80%, at least 85%, at least 90%, at least 95%, at least 98%, at least 99%, or 100%, amino acid sequence identity to corresponding stretches of from 50 to 1000 contiguous amino acids of the Spy Cas9 amino acid sequence depicted in FIG. 1.

[0063] Suitable start and end points for the deletions are depicted in FIGS. 2A and 2B. Any “start” and “end” sites within “A” deletion can be combined to generate an “A” deletion. Any “start” and “end” sites within “B” deletion can be combined to generate a “B” deletion. Any “start” and “end” sites within “C” deletion can be combined to generate a “C” deletion. Any “start” and “end” sites within “D” deletion can be combined to generate a “D” deletion. In some cases, an RNA-guided effector polypeptide of the present disclosure comprises only an “A” deletion. In some cases, an RNA-guided effector polypeptide of the present disclosure comprises only a “B” deletion. In some cases, an RNA-guided effector polypeptide of the present disclosure comprises only a “C” deletion. In some cases, an RNA-guided effector polypeptide of the present disclosure comprises only a “D” deletion. In some cases, an RNA-guided effector polypeptide of the present disclosure comprises only an “A” deletion and a “B” deletion. In some cases, an RNA-guided effector polypeptide of the present disclosure comprises only an “A” deletion and a “C” deletion. In some cases, an RNA-guided effector polypeptide of the present disclosure comprises only an “A” deletion and a “B” deletion. In some cases, an RNA-guided effector polypeptide of the present disclosure comprises only an “A” deletion and a “D” deletion. In some cases, an RNA-guided effector polypeptide of the present disclosure comprises only a “B” deletion and a “C” deletion. In some cases, an RNA-guided effector polypeptide of the present disclosure comprises only a “B” deletion and a “D” deletion. In some cases, an RNA-guided effector polypeptide of the present disclosure comprises only a “C” deletion and a “D” deletion. In some cases, an RNA-guided effector polypeptide of the present disclosure comprises an “A” deletion, a “B” deletion, and a “C” deletion (and not a “D” deletion). In some cases, an RNA-guided effector polypeptide of the present disclosure comprises an “A” deletion, a “B” deletion, and a “D” deletion (and not a “C” deletion). In some cases, an RNA-guided effector polypeptide of the present disclosure comprises an “A” deletion, a “D” deletion, and a “D” deletion (and not a “B” deletion). In some cases, an RNA-guided effector polypeptide of the present disclosure comprises “B” deletion, a “C” deletion, and a “D” deletion (and not an “A” deletion). In some cases, an RNA-guided effector polypeptide of the present disclosure comprises an “A” deletion, a “B” deletion, a “C” deletion, and a “D” deletion.

[0064] As depicted in FIG. 8, in some cases, an “A” deletion comprises all or a portion of the Helical II domain of Spy Cas9. As depicted in FIG. 8, in some cases, a “B” deletion comprises all or a portion of the Helical III domain of Spy Cas9. As depicted in FIG. 8, in some cases, a “C” deletion comprises all or a portion of the HNH domain of Spy Cas9; and may also comprises a portion of the RuvC III domain of Spy Cas9. As depicted in FIG. 8, in some cases, a “D” deletion comprises a portion of the RuvC III domain of Spy Cas9.

[0065] Non-limiting examples of RNA-guided effector polypeptides of the present disclosure that comprises one or more of “A,” “B,” “C,” and “D” deletions are depicted in FIG. 23. Examples of suitable combination of “A,” “B,” “C,” and “D” deletions are depicted in FIG. 23.

[0066] In some cases, an RNA-guided effector polypeptide of the present disclosure is a Cas9 protein that lacks all or a portion of one or more of following domains (in any combination): the Helical II domain, the Helical III domain, the HNH domain, and the RuvC III domain Any Cas9 protein can be used as a starting point for generation deletions, to generate an RNA-guided effector polypeptide of the present disclosure. Examples of suitable Cas9 proteins include, but are not limited to, those set forth in SEQ ID NOs: 5-816. In some cases, an RNA-guided effector polypeptide of the present disclosure comprises an “A” deletion based on the amino acid sequence of SEQ ID NO:5, or a corresponding deletion of a polypeptide as set forth in any one of SEQ ID NOs: 6-816. In some cases, an RNA-guided effector polypeptide of the present disclosure comprises an “A” deletion and a “B” deletion based on the amino acid sequence of SEQ ID NO:5, or a corresponding deletion of a polypeptide as set forth in any one of SEQ ID NOs: 6-816. In some cases, an RNA-guided effector polypeptide of the present disclosure comprises an “A” deletion and a “C” deletion based on the amino acid sequence of SEQ ID NO:5, or a corresponding deletion of a polypeptide as set forth in any one of SEQ ID NOs: 6-816. In some cases, an RNA-guided effector polypeptide of the present disclosure comprises an “A” deletion and a “D” deletion based on the amino acid sequence of SEQ ID NO:5, or a corresponding deletion of a polypeptide as set forth in any one of SEQ ID NOs: 6-816. In some cases, an RNA-guided effector polypeptide of the present disclosure comprises an “A” deletion, a “B” deletion, and a “C” deletion based on the amino acid sequence of SEQ ID NO:5, or a corresponding deletion of a polypeptide as set forth in any one of SEQ ID NOs: 6-816. In some cases, an RNA-guided effector polypeptide of the present disclosure comprises an “A” deletion a “B” deletion, a “C” deletion, and a “D” deletion based on the amino acid sequence of SEQ ID NO:5, or a corresponding deletion of a polypeptide as set forth in any one of SEQ ID NOs: 6-816. In some cases, an RNA-guided effector polypeptide of the present disclosure comprises a “B” deletion, a “C” deletion, and a “D” deletion based on the amino acid sequence of SEQ ID NO:5, or a corresponding deletion of a polypeptide as set forth in any one of SEQ ID NOs: 6-816. In some cases, an RNA-guided effector polypeptide of the present disclosure comprises an “A” deletion a “C” deletion and a “D” deletion based on the amino acid sequence of SEQ ID NO:5, or a corresponding deletion of a polypeptide as set forth in any one of SEQ ID NOs: 6-816. While the following description of various deletions refers to Spy Cas9, the description can be applied to a Cas9 comprising an amino acid sequence set forth in any one of SEQ ID NOs:5-816. The amino acid sequence of a “corresponding deletion of a polypeptide as set forth in any one of SEQ ID NOs:6-816” can be readily determined using a multiple sequence alignment of one or more of the amino acid sequences set forth in SEQ ID NOs:6-816 with the amino acid sequence set forth in SEQ ID NO:5 (Streptococcus pyogenes Cas9).

### “A” Deletion

[0067] In some cases, an RNA-guided effector polypeptide of the present disclosure comprises a deletion of from about 5 contiguous amino acids to about 158 contiguous amino acids (e.g., from about 5 to about 50, from about 50 to about 75, from about 75 to about 100, from about 100 to about 125, or from about 125 to about 158 contiguous amino acids) of a region corresponding to amino acids 166-324 of the Spy Cas9 amino acid sequence depicted in FIG. 1; and comprises one or more stretches of from 50 to 1000 contiguous amino acids (e.g., from 50 to 75, from 75 to 100, from 100 to 150, from 150 to 200, from 200 to 250, from 250 to 300, from 300 to 350, from 350 to 400, from 400 to 450, from 450 to 500, from 500 to 600, from 600 to 700, from 700 to 800, from 800 to 900, or from 900 to 1000, contiguous amino acids) having at least 85%, at least 90%, at least 95%, at least 98%, at least 99%, or 100%, amino acid sequence identity to corresponding stretches of from 50 to 1000 contiguous amino acids (e.g., from 50 to 75, from 75 to 100, from 100 to 150, from 150 to 200, from 200 to 250, from 250 to 300, from 300 to 350, from 350 to 400, from 400 to 450, from 450 to 500, from 500 to 600, from 600 to 700, from 700 to 800, from 800 to 900, or from 900 to 1000, contiguous amino acids) of the Spy Cas9 amino acid sequence depicted in FIG. 1. In some cases, an RNA-guided effector polypeptide of the present disclosure comprises only one deletion of from about 5 contiguous amino acids to about 158 contiguous amino acids (e.g., from about 5 to about 50, from about 50 to about 75, from about 75 to about 100, from about 100 to about 125, or from about 125 to about 158 contiguous amino acids) of a region corresponding to amino acids 166-324 of the Spy Cas9 amino acid sequence depicted in FIG. 1. In some cases, an RNA-guided effector polypeptide of the present disclosure comprising an “A” deletion has a length of from about 1210 amino acids to about 1363 amino acids, e.g., from about 1210 amino acids (aa) to about 1220 aa, from about 1220 aa to about 1230 aa, from about 1230 aa to about 1240 aa, from about 1240 aa to about 1250 aa, from about 1250 aa to about 1260 aa, from about 1260 aa to about 1270 aa, from about 1270 aa to about 1280 aa, from about 1280 aa to about 1290 aa, from about 1290 aa to about 1300 aa, from about 1300 aa to about 1310 aa, from about 1310 aa to about 1320 aa, from about 1320 aa to about 1330 aa, from about 1330 aa to about 1340 aa, from about 1340 aa to about 1350 aa, or from about 1350 aa to 1363 aa. In some cases, an RNA-guided effector polypeptide of the present disclosure comprising only an “A” deletion has a length of 1210 amino acids.

### “B” Deletion

[0068] In some cases, an RNA-guided effector polypeptide of the present disclosure comprises a deletion of from about 30 contiguous amino acids to about 255 contiguous amino acids (e.g., from about 30 to about 50, from about 50 to about 75, from about 75 to about 100, from about 100 to about 150, from about 150 to about 200, or from about 200 to about 255 contiguous amino acids) of a region corresponding to amino acids 484-739 of the Spy Cas9 amino acid sequence depicted in FIG. 1; and comprises one or more stretches of from 50 to 1000 contiguous amino acids (e.g., from 50 to 75, from 75 to 100, from 100 to 150, from 150 to 200, from 200 to 250, from 250 to 300, from 300 to 350, from 350 to 400, from 400 to 450, from 450 to 500, from 500 to 600, from 600 to 700, from 700 to 800, from 800 to 900, or from 900 to 1000, contiguous amino acids) having at least 85%, at least 90%, at least 95%, at least 98%, at least 99%, or 100%, amino acid sequence identity to corresponding stretches of from 50 to 1000 contiguous amino acids (e.g., from 50 to 75, from 75 to 100, from 100 to 150, from 150 to 200, from 200 to 250, from 250 to 300, from 300 to 350, from 350 to 400, from 400 to 450, from 450 to 500, from 500 to 600, from 600 to 700, from 700 to 800, from 800 to 900, or from 900 to 1000, contiguous amino acids) of the Spy Cas9 amino acid sequence depicted in FIG. 1. In some cases, an RNA-guided effector polypeptide of the present disclosure comprises only one deletion of from about 30 contiguous amino acids to about 255 contiguous amino acids (e.g., from about 30 to about 50, from about 50 to about 75, from about 75 to about 100, from about 100 to about 150, from about 150 to about 200, or from about 200 to about 255 contiguous amino acids) of a region corresponding to amino acids 484-739 of the Spy Cas9 amino acid sequence depicted in FIG. 1. In some cases, an RNA-guided effector polypeptide of the present disclosure comprising a “B” deletion has a length of from about 1113 amino acids to about 1338 amino acids, e.g., from about 1113 amino acids (aa) to about 1120 aa, from about 1120 aa to about 1130 aa, from about 1130 aa to about 1140 aa, from about 1140 aa to about 1150 aa, from about 1150 aa to about 1160 aa, from about 1160 aa to about 1170 aa, from about 1170 aa to about 1180 aa, from about 1180 aa to about 1190 aa, from about 1190 aa to about 1200 aa, from about 1200 aa to about 1225 aa, from about 1225 aa to about 1250 aa, from about 1250 aa to about 1275 aa, from about 1275 aa to about 1300 aa, from about 1300 aa to about 1325 aa, or from about 1325 aa to 1338 aa. In some cases, an RNA-guided effector polypeptide of the present disclosure comprising only a “B” deletion has a length of 1163 aa, 1164 aa, or 1165 aa.

### “C” Deletion

[0069] In some cases, an RNA-guided effector polypeptide of the present disclosure comprises a deletion of from about 4 contiguous amino acids to about 220 contiguous amino acids (e.g., from about 4 to about 25, from about 25 to about 50, from about 50 to about 75, from about 75 to about 100, from about 100 to about 150, from about 150 to about 200, or from about 200 to about 220, contiguous amino acids) of a region corresponding to amino acids 761-981 of the Spy Cas9 amino acid sequence depicted in FIG. 1; and comprises one or more stretches of from 50 to 1000 contiguous amino acids (e.g., from 50 to 75, from 75 to 100, from 100 to 150, from 150 to 200, from 200 to 250, from 250 to 300, from 300 to 350, from 350 to 400, from 400 to 450, from 450 to 500, from 500 to 600, from 600 to 700, from 700 to 800, from 800 to 900, or from 900 to 1000, contiguous amino acids) having at least 85%, at least 90%, at least 95%, at least 98%, at least 99%, or 100%, amino acid sequence identity to corresponding stretches of from 50 to 1000 contiguous amino acids (e.g., from 50 to 75, from 75 to 100, from 100 to 150, from 150 to 200, from 200 to 250, from 250 to 300, from 300 to 350, from 350 to 400, from 400 to 450, from 450 to 500, from 500 to 600, from 600 to 700, from 700 to 800, from 800 to 900, or from 900 to 1000, contiguous amino acids) of the Spy Cas9 amino acid sequence depicted in FIG. 1. In some cases, an RNA-guided effector polypeptide of the present disclosure comprises only one deletion of from about 4 contiguous amino acids to about 220 contiguous amino acids (e.g., from about 4 to about 25, from about 25 to about 50, from about 50 to about 75, from about 75 to about 100, from about 100 to about 150, from about 150 to about 200, or from about 200 to about 220, contiguous amino acids) of a region corresponding to amino acids 761-981 of the Spy Cas9 amino acid sequence depicted in FIG. 1. In some cases, an RNA-guided effector polypeptide of the present disclosure comprising a “C” deletion has a length of from about 1148 amino acids to about 1364 amino acids, e.g., from about 1148 amino acids (aa) to about 1175 aa, from about 1175 aa to about 1200 aa, from about 1200 aa to about 1225 aa, from about 1225 aa to about 1250 aa, from about 1250 aa to about 1275 aa, from about 1275 aa to about 1300 aa, from about 1300 aa to about 1325 aa, from about 1325 aa to 1350 aa, or from about 1350 aa to 1364 aa. In some cases, an RNA-guided effector polypeptide of the present disclosure comprising only a “C” deletion has a length of 1263 aa, 1264 aa, or 1265 aa.

### “D” Deletion

[0070] In some cases, an RNA-guided effector polypeptide of the present disclosure comprises a deletion of from about 20 contiguous amino acids to about 118 contiguous amino acids (e.g., from about 20 to about 40, from about 40 to about 60, from about 60 to about 80, from about 80 to about 100, or from about 100 to about 118 contiguous amino acids) of a region corresponding to amino acids 994-1112 of the Spy Cas9 amino acid sequence depicted in FIG. 1; and comprises one or more stretches of from 50 to 1000 contiguous amino acids (e.g., from 50 to 75, from 75 to 100, from 100 to 150, from 150 to 200, from 200 to 250, from 250 to 300, from 300 to 350, from 350 to 400, from 400 to 450, from 450 to 500, from 500 to 600, from 600 to 700, from 700 to 800, from 800 to 900, or from 900 to 1000, contiguous amino acids) having at least 85%, at least 90%, at least 95%, at least 98%, at least 99%, or 100%, amino acid sequence identity to corresponding stretches of from 50 to 1000 contiguous amino acids (e.g., from 50 to 75, from 75 to 100, from 100 to 150, from 150 to 200, from 200 to 250, from 250 to 300, from 300 to 350, from 350 to 400, from 400 to 450, from 450 to 500, from 500 to 600, from 600 to 700, from 700 to 800, from 800 to 900, or from 900 to 1000, contiguous amino acids) of the Spy Cas9 amino acid sequence depicted in FIG. 1. In some cases, an RNA-guided effector polypeptide of the present disclosure comprises only one deletion of from about 20 contiguous amino acids to about 118 contiguous amino acids (e.g., from about 20 to about 40, from about 40 to about 60, from about 60 to about 80, from about 80 to about 100, or from about 100 to about 118 contiguous amino acids) of a region corresponding to amino acids 994-1112 of the Spy Cas9 amino acid sequence depicted in FIG. 1. In some cases, an RNA-guided effector polypeptide of the present disclosure comprising a “D” deletion has a length of from about 1250 amino acids to about 1348 amino acids, e.g., from about 1250 amino acids (aa) to about 1275 aa, from about 1275 aa to about 1300 aa, from about 1300 aa to about 1325 aa, or from about 1325 aa to about 1348 aa. In some cases, an RNA-guided effector polypeptide of the present disclosure comprising only a “D” deletion has a length of 1297 aa, 1298 aa, or 1299 aa.

### “A+B” Deletion

[0071] In some cases, an RNA-guided effector polypeptide of the present disclosure comprises: i) a deletion of from about 5 contiguous amino acids to about 158 contiguous amino acids (e.g., from about 5 to about 50, from about 50 to about 75, from about 75 to about 100, from about 100 to about 125, or from about 125 to about 158 contiguous amino acids) of a region corresponding to amino acids 166-324 of the Spy Cas9 amino acid sequence depicted in FIG. 1; and ii) a deletion of from about 30 contiguous amino acids to about 255 contiguous amino acids (e.g., from about 30 to about 50, from about 50 to about 75, from about 75 to about 100, from about 100 to about 150, from about 150 to about 200, or from about 200 to about 255 contiguous amino acids) of a region corresponding to amino acids 484-739 of the Spy Cas9 amino acid sequence depicted in FIG. 1; and comprises one or more stretches of from 50 to 1000 contiguous amino acids (e.g., from 50 to 75, from 75 to 100, from 100 to 150, from 150 to 200, from 200 to 250, from 250 to 300, from 300 to 350, from 350 to 400, from 400 to 450, from 450 to 500, from 500 to 600, from 600 to 700, from 700 to 800, from 800 to 900, or from 900 to 1000, contiguous amino acids) having at least 85%, at least 90%, at least 95%, at least 98%, at least 99%, or 100%, amino acid sequence identity to corresponding stretches of from 50 to 1000 contiguous amino acids (e.g., from 50 to 75, from 75 to 100, from 100 to 150, from 150 to 200, from 200 to 250, from 250 to 300, from 300 to 350, from 350 to 400, from 400 to 450, from 450 to 500, from 500 to 600, from 600 to 700, from 700 to 800, from 800 to 900, or from 900 to 1000, contiguous amino acids) of the Spy Cas9 amino acid sequence depicted in FIG. 1. In some case, the RNA-guided effector polypeptide comprises no deletions other than the “A” and “B” deletions. In some cases, an RNA-guided effector polypeptide of the present disclosure comprising an “A” deletion and a “B” deletion has a length of from about 955 amino acids to about 1333 amino acids, e.g., from about 955 amino acids (aa) to about 975 aa, from about 975 aa to about 1000 aa, from about 1000 aa to about 1025 aa, from about 1025 aa to about 1050 aa, from about 1050 aa to about 1075 aa, from about 1075 aa to about 1100 aa, from about 1100 aa to about 1125 aa, from about 1125 aa to about 1150 aa, from about 1150 aa to about 1175 aa, from about 1175 aa to about 1200 aa, from about 1200 aa to about 1225 aa, from about 1225 aa to about 1250 aa, from about 1250 aa to about 1275 aa, from about 1275 aa to about 1300 aa, or from about 1300 aa to about 1333 aa. In some cases, an RNA-guided effector polypeptide of the present disclosure comprising only an “A” deletion and a “B” deletion has a length of from about 1045 aa to about 1050 aa. In some cases, an RNA-guided effector polypeptide of the present disclosure comprising only an “A” deletion and a “B” deletion has a length of 1046 aa, 1047 aa, or 1048 aa.

### “A+C” Deletion

[0072] In some cases, an RNA-guided effector polypeptide of the present disclosure comprises: i) a deletion of from about 5 contiguous amino acids to about 158 contiguous amino acids (e.g., from about 5 to about 50, from about 50 to about 75, from about 75 to about 100, from about 100 to about 125, or from about 125 to about 158 contiguous amino acids) of a region corresponding to amino acids 166-324 of the Spy Cas9 amino acid sequence depicted in FIG. 1; and ii) a deletion of from about 4 contiguous amino acids to about 220 contiguous amino acids (e.g., from about 4 to about 25, from about 25 to about 50, from about 50 to about 75, from about 75 to about 100, from about 100 to about 150, from about 150 to about 200, or from about 200 to about 220, contiguous amino acids) of a region corresponding to amino acids 761-981 of the Spy Cas9 amino acid sequence depicted in FIG. 1; and comprises one or more stretches of from 50 to 1000 contiguous amino acids (e.g., from 50 to 75, from 75 to 100, from 100 to 150, from 150 to 200, from 200 to 250, from 250 to 300, from 300 to 350, from 350 to 400, from 400 to 450, from 450 to 500, from 500 to 600, from 600 to 700, from 700 to 800, from 800 to 900, or from 900 to 1000, contiguous amino acids) having at least 85%, at least 90%, at least 95%, at least 98%, at least 99%, or 100%, amino acid sequence identity to corresponding stretches of from 50 to 1000 contiguous amino acids (e.g., from 50 to 75, from 75 to 100, from 100 to 150, from 150 to 200, from 200 to 250, from 250 to 300, from 300 to 350, from 350 to 400, from 400 to 450, from 450 to 500, from 500 to 600, from 600 to 700, from 700 to 800, from 800 to 900, or from 900 to 1000, contiguous amino acids) of the Spy Cas9 amino acid sequence depicted in FIG. 1. In some case, the RNA-guided effector polypeptide comprises no deletions other than the “A” and “C” deletions. In some cases, an RNA-guided effector polypeptide of the present disclosure comprising an “A” deletion and a “C” deletion has a length of from about 990 amino acids to about 1360 amino acids, e.g., from about 990 amino acids (aa) to about 1000 aa, from about 1000 aa to about 1025 aa, from about 1025 aa to about 1050 aa, from about 1050 aa to about 1075 aa, from about 1075 aa to about 1100 aa, from about 1100 aa to about 1125 aa, from about 1125 aa to about 1150 aa, from about 1150 aa to about 1175 aa, from about 1175 aa to about 1200 aa, from about 1200 aa to about 1225 aa, from about 1225 aa to about 1250 aa, from about 1250 aa to about 1275 aa, from about 1275 aa to about 1300 aa, from about 1300 aa to about 1325 aa, or from about 1325 aa to about 1360 aa. In some cases, an RNA-guided effector polypeptide of the present disclosure comprising only an “A” deletion and a “C” deletion has a length of from about 1140 aa to about 1150 aa. In some cases, an RNA-guided effector polypeptide of the present disclosure comprising an “A” deletion and a “C” deletion has a length of 1146 aa, 1147 aa, 1148 aa, 1149 aa, or 1150 aa.

### “A+D” Deletion

[0073] In some cases, an RNA-guided effector polypeptide of the present disclosure comprises: i) a deletion of from about 5 contiguous amino acids to about 158 contiguous amino acids (e.g., from about 5 to about 50, from about 50 to about 75, from about 75 to about 100, from about 100 to about 125, or from about 125 to about 158 contiguous amino acids) of a region corresponding to amino acids 166-324 of the Spy Cas9 amino acid sequence depicted in FIG. 1; and ii) a deletion of from about 20 contiguous amino acids to about 118 contiguous amino acids (e.g., from about 20 to about 40, from about 40 to about 60, from about 60 to about 80, from about 80 to about 100, or from about 100 to about 118 contiguous amino acids) of a region corresponding to amino acids 994-1112 of the Spy Cas9 amino acid sequence depicted in FIG. 1; and comprises one or more stretches of from 50 to 1000 contiguous amino acids (e.g., from 50 to 75, from 75 to 100, from 100 to 150, from 150 to 200, from 200 to 250, from 250 to 300, from 300 to 350, from 350 to 400, from 400 to 450, from 450 to 500, from 500 to 600, from 600 to 700, from 700 to 800, from 800 to 900, or from 900 to 1000, contiguous amino acids) having at least 85%, at least 90%, at least 95%, at least 98%, at least 99%, or 100%, amino acid sequence identity to corresponding stretches of from 50 to 1000 contiguous amino acids (e.g., from 50 to 75, from 75 to 100, from 100 to 150, from 150 to 200, from 200 to 250, from 250 to 300, from 300 to 350, from 350 to 400, from 400 to 450, from 450 to 500, from 500 to 600, from 600 to 700, from 700 to 800, from 800 to 900, or from 900 to 1000, contiguous amino acids) of the Spy Cas9 amino acid sequence depicted in FIG. 1. In some case, the RNA-guided effector polypeptide comprises no deletions other than the “A” and “D” deletions. In some cases, an RNA-guided effector polypeptide of the present disclosure comprising an “A” deletion and a “D” deletion has a length of from about 1090 amino acids to about 1343 amino acids, e.g., from about 1090 amino acids (aa) to about 1100 aa, from about 1100 aa to about 1125 aa, from about 1125 aa to about 1150 aa, from about 1150 aa to about 1175 aa, from about 1175 aa to about 1200 aa, from about 1200 aa to about 1225 aa, from about 1225 aa to about 1250 aa, from about 1250 aa to about 1275 aa, from about 1275 aa to about 1300 aa, from about 1300 aa to about 1325 aa, or from about 1325 aa to about 1343 aa. In some cases, an RNA-guided effector polypeptide of the present disclosure comprising an “A” deletion and a “D” deletion has a length of from about 1275 aa to about 1300 aa. In some cases, an RNA-guided effector polypeptide of the present disclosure comprising an “A” deletion and a “D” deletion has a length of 1280 aa, 1281 aa, 1282 aa, 1283 aa, or 1284 aa.

### “B”+“C” Deletions

[0074] In some cases, an RNA-guided effector polypeptide of the present disclosure comprises: i) a deletion of from about 30 contiguous amino acids to about 255 contiguous amino acids (e.g., from about 30 to about 50, from about 50 to about 75, from about 75 to about 100, from about 100 to about 150, from about 150 to about 200, or from about 200 to about 255 contiguous amino acids) of a region corresponding to amino acids 484-739 of the Spy Cas9 amino acid sequence depicted in FIG. 1; and ii) a deletion of from about 4 contiguous amino acids to about 220 contiguous amino acids (e.g., from about 4 to about 25, from about 25 to about 50, from about 50 to about 75, from about 75 to about 100, from about 100 to about 150, from about 150 to about 200, or from about 200 to about 220, contiguous amino acids) of a region corresponding to amino acids 761-981 of the Spy Cas9 amino acid sequence depicted in FIG. 1; and comprises one or more stretches of from 50 to 1000 contiguous amino acids (e.g., from 50 to 75, from 75 to 100, from 100 to 150, from 150 to 200, from 200 to 250, from 250 to 300, from 300 to 350, from 350 to 400, from 400 to 450, from 450 to 500, from 500 to 600, from 600 to 700, from 700 to 800, from 800 to 900, or from 900 to 1000, contiguous amino acids) having at least 85%, at least 90%, at least 95%, at least 98%, at least 99%, or 100%, amino acid sequence identity to corresponding stretches of from 50 to 1000 contiguous amino acids (e.g., from 50 to 75, from 75 to 100, from 100 to 150, from 150 to 200, from 200 to 250, from 250 to 300, from 300 to 350, from 350 to 400, from 400 to 450, from 450 to 500, from 500 to 600, from 600 to 700, from 700 to 800, from 800 to 900, or from 900 to 1000, contiguous amino acids) of the Spy Cas9 amino acid sequence depicted in FIG. 1. In some case, the RNA-guided effector polypeptide comprises no deletions other than the “B” and “C” deletions. In some cases, an RNA-guided effector polypeptide of the present disclosure comprising a “B” deletion and a “C” deletion has a length of from about 890 amino acids to about 1334 amino acids, e.g., from about 890 amino acids (aa) to about 900 aa, from about 900 aa to about 925 aa, from about 925 aa to about 950 aa, from about 950 aa to about 975 aa, from about 975 aa to about 1000 aa, from about 1000 aa to about 1025 aa, from about 1025 aa to about 1050 aa, from about 1050 aa to about 1075 aa, from about 1075 aa to about 1100 aa, from about 1100 aa to about 1125 aa, from about 1125 aa to about 1150 aa, from about 1150 aa to about 1175 aa, from about 1175 aa to about 1200 aa, from about 1200 aa to about 1225 aa, from about 1225 aa to about 1250 aa, from about 1250 aa to about 1275 aa, from about 1275 aa to about 1300 aa, from about 1300 aa to about 1325 aa, or from about 1325 aa to about 1334 aa. In some cases, an RNA-guided effector polypeptide of the present disclosure comprising a “B” deletion and a “C” deletion has a length of from about 1050 aa to about 1075 aa. In some cases, an RNA-guided effector polypeptide of the present disclosure comprising a “B” deletion and a “C” deletion has a length of 1058 aa, 1059 aa, 1060 aa, 1061 aa, or 1062 aa.

### “B”+“D” Deletion

[0075] In some cases, an RNA-guided effector polypeptide of the present disclosure comprises: i) a deletion of from about 30 contiguous amino acids to about 255 contiguous amino acids (e.g., from about 30 to about 50, from about 50 to about 75, from about 75 to about 100, from about 100 to about 150, from about 150 to about 200, or from about 200 to about 255 contiguous amino acids) of a region corresponding to amino acids 484-739 of the Spy Cas9 amino acid sequence depicted in FIG. 1; and ii) a deletion of from about 20 contiguous amino acids to about 118 contiguous amino acids (e.g., from about 20 to about 40, from about 40 to about 60, from about 60 to about 80, from about 80 to about 100, or from about 100 to about 118 contiguous amino acids) of a region corresponding to amino acids 994-1112 of the Spy Cas9 amino acid sequence depicted in FIG. 1; and comprises one or more stretches of from 50 to 1000 contiguous amino acids (e.g., from 50 to 75, from 75 to 100, from 100 to 150, from 150 to 200, from 200 to 250, from 250 to 300, from 300 to 350, from 350 to 400, from 400 to 450, from 450 to 500, from 500 to 600, from 600 to 700, from 700 to 800, from 800 to 900, or from 900 to 1000, contiguous amino acids) having at least 85%, at least 90%, at least 95%, at least 98%, at least 99%, or 100%, amino acid sequence identity to corresponding stretches of from 50 to 1000 contiguous amino acids (e.g., from 50 to 75, from 75 to 100, from 100 to 150, from 150 to 200, from 200 to 250, from 250 to 300, from 300 to 350, from 350 to 400, from 400 to 450, from 450 to 500, from 500 to 600, from 600 to 700, from 700 to 800, from 800 to 900, or from 900 to 1000, contiguous amino acids) of the Spy Cas9 amino acid sequence depicted in FIG. 1. In some case, the RNA-guided effector polypeptide comprises no deletions other than the “B” and “D” deletions. In some cases, an RNA-guided effector polypeptide of the present disclosure comprising a “B” deletion and a “D” deletion has a length of from about 995 amino acids to about 1318 amino acids, e.g., from about 995 amino acids (aa) to about 1000 aa, from about 1000 aa to about 1025 aa, from about 1025 aa to about 1050 aa, from about 1050 aa to about 1075 aa, from about 1075 aa to about 1100 aa, from about 1100 aa to about 1125 aa, from about 1125 aa to about 1150 aa, from about 1150 aa to about 1175 aa, from about 1175 aa to about 1200 aa, from about 1200 aa to about 1225 aa, from about 1225 aa to about 1250 aa, from about 1250 aa to about 1275 aa, from about 1275 aa to about 1300 aa, or from about 1300 aa to about 1318 aa. In some cases, an RNA-guided effector polypeptide of the present disclosure comprising a “B” deletion and a “D” deletion has a length of from about 1090 a to about 1100 aa. In some cases, an RNA-guided effector polypeptide of the present disclosure comprising a “B” deletion and a “D” deletion has a length of 1092 aa, 1093 aa, 1094 aa, or 1095 aa.

### “C”+“D” Deletions

[0076] In some cases, an RNA-guided effector polypeptide of the present disclosure comprises: i) a deletion of from about 4 contiguous amino acids to about 220 contiguous amino acids (e.g., from about 4 to about 25, from about 25 to about 50, from about 50 to about 75, from about 75 to about 100, from about 100 to about 150, from about 150 to about 200, or from about 200 to about 220, contiguous amino acids) of a region corresponding to amino acids 761-981 of the Spy Cas9 amino acid sequence depicted in FIG. 1; and ii) a deletion of from about 20 contiguous amino acids to about 118 contiguous amino acids (e.g., from about 20 to about 40, from about 40 to about 60, from about 60 to about 80, from about 80 to about 100, or from about 100 to about 118 contiguous amino acids) of a region corresponding to amino acids 994-1112 of the Spy Cas9 amino acid sequence depicted in FIG. 1; and comprises one or more stretches of from 50 to 1000 contiguous amino acids (e.g., from 50 to 75, from 75 to 100, from 100 to 150, from 150 to 200, from 200 to 250, from 250 to 300, from 300 to 350, from 350 to 400, from 400 to 450, from 450 to 500, from 500 to 600, from 600 to 700, from 700 to 800, from 800 to 900, or from 900 to 1000, contiguous amino acids) having at least 85%, at least 90%, at least 95%, at least 98%, at least 99%, or 100%, amino acid sequence identity to corresponding stretches of from 50 to 1000 contiguous amino acids (e.g., from 50 to 75, from 75 to 100, from 100 to 150, from 150 to 200, from 200 to 250, from 250 to 300, from 300 to 350, from 350 to 400, from 400 to 450, from 450 to 500, from 500 to 600, from 600 to 700, from 700 to 800, from 800 to 900, or from 900 to 1000, contiguous amino acids) of the Spy Cas9 amino acid sequence depicted in FIG. 1. In some case, the RNA-guided effector polypeptide comprises no deletions other than the “C” and “D” deletions. In some cases, an RNA-guided effector polypeptide of the present disclosure comprising a “C” deletion and a “D” deletion has a length of from about 1030 amino acids to about 1344 amino acids, e.g., from about 1030 amino acids (aa) to about 1050 aa, from about 1150 aa to about 1175 aa, from about 1175 aa to about 1200 aa, from about 1200 aa to about 1225 aa, from about 1225 aa to about 1250 aa, from about 1250 aa to about 1275 aa, from about 1275 aa to about 1300 aa, from about 1300 aa to about 1325 aa, or from about 1325 aa to about 1344 aa. In some cases, an RNA-guided effector polypeptide of the present disclosure comprising a “C” deletion and a “D” deletion has a length of from about 1190 to about 1200. In some cases, an RNA-guided effector polypeptide of the present disclosure comprising a “C” deletion and a “D” deletion has a length of 1192 aa, 1193 aa, 1194 aa, or 1195 aa.

### “A”+“B”+“C” Deletions

[0077] In some cases, an RNA-guided effector polypeptide of the present disclosure comprises: i) a deletion of from about 5 contiguous amino acids to about 158 contiguous amino acids (e.g., from about 5 to about 50, from about 50 to about 75, from about 75 to about 100, from about 100 to about 125, or from about 125 to about 158 contiguous amino acids) of a region corresponding to amino acids 166-324 of the Spy Cas9 amino acid sequence depicted in FIG. 1; ii) a deletion of from about 30 contiguous amino acids to about 255 contiguous amino acids (e.g., from about 30 to about 50, from about 50 to about 75, from about 75 to about 100, from about 100 to about 150, from about 150 to about 200, or from about 200 to about 255 contiguous amino acids) of a region corresponding to amino acids 484-739 of the Spy Cas9 amino acid sequence depicted in FIG. 1; and iii) a deletion of from about 4 contiguous amino acids to about 220 contiguous amino acids (e.g., from about 4 to about 25, from about 25 to about 50, from about 50 to about 75, from about 75 to about 100, from about 100 to about 150, from about 150 to about 200, or from about 200 to about 220, contiguous amino acids) of a region corresponding to amino acids 761-981 of the Spy Cas9 amino acid sequence depicted in FIG. 1; and comprises one or more stretches of from 50 to 1000 contiguous amino acids (e.g., from 50 to 75, from 75 to 100, from 100 to 150, from 150 to 200, from 200 to 250, from 250 to 300, from 300 to 350, from 350 to 400, from 400 to 450, from 450 to 500, from 500 to 600, from 600 to 700, from 700 to 800, from 800 to 900, or from 900 to 1000, contiguous amino acids) having at least 85%, at least 90%, at least 95%, at least 98%, at least 99%, or 100%, amino acid sequence identity to corresponding stretches of from 50 to 1000 contiguous amino acids (e.g., from 50 to 75, from 75 to 100, from 100 to 150, from 150 to 200, from 200 to 250, from 250 to 300, from 300 to 350, from 350 to 400, from 400 to 450, from 450 to 500, from 500 to 600, from 600 to 700, from 700 to 800, from 800 to 900, or from 900 to 1000, contiguous amino acids) of the Spy Cas9 amino acid sequence depicted in FIG. 1. In some case, the RNA-guided effector polypeptide comprises no deletions other than the “A,” “B,” and “C” deletions. In some cases, an RNA-guided effector polypeptide of the present disclosure comprising an “A” deletion, a “B” deletion, and a “C” deletion has a length of from about 735 amino acids to about 1329 amino acids, e.g., from about 735 amino acids (aa) to about 750 aa, from about 750 aa to about 775 aa, from about 775 aa to about 800 aa, from about 800 aa to about 825 aa, from about 825 aa to about 850 aa, from about 850 aa to about 875 aa, from about 875 aa to about 900 aa, from about 900 aa to about 925 aa, from about 925 aa to about 950 aa, from about 950 aa to about 975 aa, from about 975 aa to about 1000 aa, from about 1000 aa to about 1025 aa, from about 1025 aa to about 1050 aa, from about 1050 aa to about 1075 aa, from about 1075 aa to about 1100 aa, from about 1100 aa to about 1125 aa, from about 1125 aa to about 1150 aa, from about 1150 aa to about 1175 aa, from about 1175 aa to about 1200 aa, from about 1200 aa to about 1225 aa, from about 1225 aa to about 1250 aa, from about 1250 aa to about 1275 aa, from about 1275 aa to about 1300 aa, or from about 1300 aa to about 1329 aa. In some cases, an RNA-guided effector polypeptide of the present disclosure comprising an “A” deletion, a “B” deletion, and a “C” deletion has a length of from about 930 aa to about 970 aa. In some cases, an RNA-guided effector polypeptide of the present disclosure comprising an “A” deletion, a “B” deletion, and a “C” deletion has a length of from about 940 aa to about 950 aa.

### “A”+“B”+“D” Deletions

[0078] In some cases, an RNA-guided effector polypeptide of the present disclosure comprises: i) a deletion of from about 5 contiguous amino acids to about 158 contiguous amino acids (e.g., from about 5 to about 50, from about 50 to about 75, from about 75 to about 100, from about 100 to about 125, or from about 125 to about 158 contiguous amino acids) of a region corresponding to amino acids 166-324 of the Spy Cas9 amino acid sequence depicted in FIG. 1; ii) a deletion of from about 30 contiguous amino acids to about 255 contiguous amino acids (e.g., from about 30 to about 50, from about 50 to about 75, from about 75 to about 100, from about 100 to about 150, from about 150 to about 200, or from about 200 to about 255 contiguous amino acids) of a region corresponding to amino acids 484-739 of the Spy Cas9 amino acid sequence depicted in FIG. 1; and iii) a deletion of from about 20 contiguous amino acids to about 118 contiguous amino acids (e.g., from about 20 to about 40, from about 40 to about 60, from about 60 to about 80, from about 80 to about 100, or from about 100 to about 118 contiguous amino acids) of a region corresponding to amino acids 994-1112 of the Spy Cas9 amino acid sequence depicted in FIG. 1; and comprises one or more stretches of from 50 to 1000 contiguous amino acids (e.g., from 50 to 75, from 75 to 100, from 100 to 150, from 150 to 200, from 200 to 250, from 250 to 300, from 300 to 350, from 350 to 400, from 400 to 450, from 450 to 500, from 500 to 600, from 600 to 700, from 700 to 800, from 800 to 900, or from 900 to 1000, contiguous amino acids) having at least 85%, at least 90%, at least 95%, at least 98%, at least 99%, or 100%, amino acid sequence identity to corresponding stretches of from 50 to 1000 contiguous amino acids (e.g., from 50 to 75, from 75 to 100, from 100 to 150, from 150 to 200, from 200 to 250, from 250 to 300, from 300 to 350, from 350 to 400, from 400 to 450, from 450 to 500, from 500 to 600, from 600 to 700, from 700 to 800, from 800 to 900, or from 900 to 1000, contiguous amino acids) of the Spy Cas9 amino acid sequence depicted in FIG. 1. In some case, the RNA-guided effector polypeptide comprises no deletions other than the “A,” “B,” and “D” deletions. In some cases, an RNA-guided effector polypeptide of the present disclosure comprising an “A” deletion, a “B” deletion, and a “D” deletion has a length of from about 837 amino acids to about 1313 amino acids, e.g., from about 837 amino acids (aa) to about 850 aa, from about 850 aa to about 875 aa, from about 875 aa to about 900 aa, from about 900 aa to about 925 aa, from about 925 aa to about 950 aa, from about 950 aa to about 975 aa, from about 975 aa to about 1000 aa, from about 1000 aa to about 1025 aa, from about 1025 aa to about 1050 aa, from about 1050 aa to about 1075 aa, from about 1075 aa to about 1100 aa, from about 1100 aa to about 1125 aa, from about 1125 aa to about 1150 aa, from about 1150 aa to about 1175 aa, from about 1175 aa to about 1200 aa, from about 1200 aa to about 1225 aa, from about 1225 aa to about 1250 aa, from about 1250 aa to about 1275 aa, from about 1275 aa to about 1300 aa, or from about 1300 aa to about 1313 aa. In some cases, an RNA-guided effector polypeptide of the present disclosure comprising an “A” deletion, a “B” deletion, and a “D” deletion has a length of from about 970 aa to about 1000 aa, In some cases, an RNA-guided effector polypeptide of the present disclosure comprising an “A” deletion, a “B” deletion, and a “D” deletion has a length of from about 975 aa to about 980 aa.

### “A”+“C”+“D” Deletions

[0079] In some cases, an RNA-guided effector polypeptide of the present disclosure comprises: i) a deletion of from about 5 contiguous amino acids to about 158 contiguous amino acids (e.g., from about 5 to about 50, from about 50 to about 75, from about 75 to about 100, from about 100 to about 125, or from about 125 to about 158 contiguous amino acids) of a region corresponding to amino acids 166-324 of the Spy Cas9 amino acid sequence depicted in FIG. 1; ii) a deletion of from about 4 contiguous amino acids to about 220 contiguous amino acids (e.g., from about 4 to about 25, from about 25 to about 50, from about 50 to about 75, from about 75 to about 100, from about 100 to about 150, from about 150 to about 200, or from about 200 to about 220, contiguous amino acids) of a region corresponding to amino acids 761-981 of the Spy Cas9 amino acid sequence depicted in FIG. 1; and iii) a deletion of from about 20 contiguous amino acids to about 118 contiguous amino acids (e.g., from about 20 to about 40, from about 40 to about 60, from about 60 to about 80, from about 80 to about 100, or from about 100 to about 118 contiguous amino acids) of a region corresponding to amino acids 994-1112 of the Spy Cas9 amino acid sequence depicted in FIG. 1; and comprises one or more stretches of from 50 to 1000 contiguous amino acids (e.g., from 50 to 75, from 75 to 100, from 100 to 150, from 150 to 200, from 200 to 250, from 250 to 300, from 300 to 350, from 350 to 400, from 400 to 450, from 450 to 500, from 500 to 600, from 600 to 700, from 700 to 800, from 800 to 900, or from 900 to 1000, contiguous amino acids) having at least 85%, at least 90%, at least 95%, at least 98%, at least 99%, or 100%, amino acid sequence identity to corresponding stretches of from 50 to 1000 contiguous amino acids (e.g., from 50 to 75, from 75 to 100, from 100 to 150, from 150 to 200, from 200 to 250, from 250 to 300, from 300 to 350, from 350 to 400, from 400 to 450, from 450 to 500, from 500 to 600, from 600 to 700, from 700 to 800, from 800 to 900, or from 900 to 1000, contiguous amino acids) of the Spy Cas9 amino acid sequence depicted in FIG. 1. In some case, the RNA-guided effector polypeptide comprises no deletions other than the “A,” “C,” and “D” deletions. In some cases, an RNA-guided effector polypeptide of the present disclosure comprising an “A” deletion, a “C” deletion, and a “D” deletion has a length of from about 870 amino acids to about 1340 amino acids, e.g., from about 870 amino acids (aa) to about 900 aa, from about 900 aa to about 925 aa, from about 925 aa to about 950 aa, from about 950 aa to about 975 aa, from about 975 aa to about 1000 aa, from about 1000 aa to about 1025 aa, from about 1025 aa to about 1050 aa, from about 1050 aa to about 1075 aa, from about 1075 aa to about 1100 aa, from about 1100 aa to about 1125 aa, from about 1125 aa to about 1150 aa, from about 1150 aa to about 1175 aa, from about 1175 aa to about 1200 aa, from about 1200 aa to about 1225 aa, from about 1225 aa to about 1250 aa, from about 1250 aa to about 1275 aa, from about 1275 aa to about 1300 aa, from about 1300 aa to about 1325 aa, or from about 1325 aa to about 1340 aa. In some cases, an RNA-guided effector polypeptide of the present disclosure comprising an “A” deletion, a “C” deletion, and a “D” deletion has a length of from about 1070 aa to about 1100 aa. In some cases, an RNA-guided effector polypeptide of the present disclosure comprising an “A” deletion, a “C” deletion, and a “D” deletion has a length of from about 1075 aa to about 1080 aa.

### “B”+“C”+“D” Deletions

[0080] In some cases, an RNA-guided effector polypeptide of the present disclosure comprises: i) a deletion of from about 5 contiguous amino acids to about 158 contiguous amino acids (e.g., from about 5 to about 50, from about 50 to about 75, from about 75 to about 100, from about 100 to about 125, or from about 125 to about 158 contiguous amino acids) of a region corresponding to amino acids 166-324 of the Spy Cas9 amino acid sequence depicted in FIG. 1; ii) a deletion of from about 4 contiguous amino acids to about 220 contiguous amino acids (e.g., from about 4 to about 25, from about 25 to about 50, from about 50 to about 75, from about 75 to about 100, from about 100 to about 150, from about 150 to about 200, or from about 200 to about 220, contiguous amino acids) of a region corresponding to amino acids 761-981 of the Spy Cas9 amino acid sequence depicted in FIG. 1; and iii) a deletion of from about 20 contiguous amino acids to about 118 contiguous amino acids (e.g., from about 20 to about 40, from about 40 to about 60, from about 60 to about 80, from about 80 to about 100, or from about 100 to about 118 contiguous amino acids) of a region corresponding to amino acids 994-1112 of the Spy Cas9 amino acid sequence depicted in FIG. 1; and comprises one or more stretches of from 50 to 1000 contiguous amino acids (e.g., from 50 to 75, from 75 to 100, from 100 to 150, from 150 to 200, from 200 to 250, from 250 to 300, from 300 to 350, from 350 to 400, from 400 to 450, from 450 to 500, from 500 to 600, from 600 to 700, from 700 to 800, from 800 to 900, or from 900 to 1000, contiguous amino acids) having at least 85%, at least 90%, at least 95%, at least 98%, at least 99%, or 100%, amino acid sequence identity to corresponding stretches of from 50 to 1000 contiguous amino acids (e.g., from 50 to 75, from 75 to 100, from 100 to 150, from 150 to 200, from 200 to 250, from 250 to 300, from 300 to 350, from 350 to 400, from 400 to 450, from 450 to 500, from 500 to 600, from 600 to 700, from 700 to 800, from 800 to 900, or from 900 to 1000, contiguous amino acids) of the Spy Cas9 amino acid sequence depicted in FIG. 1. In some case, the RNA-guided effector polypeptide comprises no deletions other than the “B,” “C,” and “D” deletions. In some cases, an RNA-guided effector polypeptide of the present disclosure comprising a “B” deletion, a “C” deletion, and a “D” deletion has a length of from about 775 amino acids to about 1314 amino acids, e.g., from about 775 aa to about 800 aa, from about 800 aa to about 825 aa, from about 825 aa to about 850 aa, from about 850 aa to about 875 aa, from about 875 aa to about 900 aa, from about 900 aa to about 925 aa, from about 925 aa to about 950 aa, from about 950 aa to about 975 aa, from about 975 aa to about 1000 aa, from about 1000 aa to about 1025 aa, from about 1025 aa to about 1050 aa, from about 1050 aa to about 1075 aa, from about 1075 aa to about 1100 aa, from about 1100 aa to about 1125 aa, from about 1125 aa to about 1150 aa, from about 1150 aa to about 1175 aa, from about 1175 aa to about 1200 aa, from about 1200 aa to about 1225 aa, from about 1225 aa to about 1250 aa, from about 1250 aa to about 1275 aa, from about 1275 aa to about 1300 aa, or from about 1300 aa to about 1314 aa. In some cases, an RNA-guided effector polypeptide of the present disclosure comprising a “B” deletion, a “C” deletion, and a “D” deletion has a length of from about 980 aa to about 1000 aa. In some cases, an RNA-guided effector polypeptide of the present disclosure comprising a “B” deletion, a “C” deletion, and a “D” deletion has a length of from about 980 aa to about 990 aa.

### “A”+“B”+“C”+“D” Deletions

[0081] In some cases, an RNA-guided effector polypeptide of the present disclosure comprises: i) a deletion of from about 5 contiguous amino acids to about 158 contiguous amino acids (e.g., from about 5 to about 50, from about 50 to about 75, from about 75 to about 100, from about 100 to about 125, or from about 125 to about 158 contiguous amino acids) of a region corresponding to amino acids 166-324 of the Spy Cas9 amino acid sequence depicted in FIG. 1; ii) a deletion of from about 5 contiguous amino acids to about 158 contiguous amino acids (e.g., from about 5 to about 50, from about 50 to about 75, from about 75 to about 100, from about 100 to about 125, or from about 125 to about 158 contiguous amino acids) of a region corresponding to amino acids 166-324 of the Spy Cas9 amino acid sequence depicted in FIG. 1; iii) a deletion of from about 4 contiguous amino acids to about 220 contiguous amino acids (e.g., from about 4 to about 25, from about 25 to about 50, from about 50 to about 75, from about 75 to about 100, from about 100 to about 150, from about 150 to about 200, or from about 200 to about 220, contiguous amino acids) of a region corresponding to amino acids 761-981 of the Spy Cas9 amino acid sequence depicted in FIG. 1; and iv) a deletion of from about 20 contiguous amino acids to about 118 contiguous amino acids (e.g., from about 20 to about 40, from about 40 to about 60, from about 60 to about 80, from about 80 to about 100, or from about 100 to about 118 contiguous amino acids) of a region corresponding to amino acids 994-1112 of the Spy Cas9 amino acid sequence depicted in FIG. 1; and comprises one or more stretches of from 50 to 1000 contiguous amino acids (e.g., from 50 to 75, from 75 to 100, from 100 to 150, from 150 to 200, from 200 to 250, from 250 to 300, from 300 to 350, from 350 to 400, from 400 to 450, from 450 to 500, from 500 to 600, from 600 to 700, from 700 to 800, from 800 to 900, or from 900 to 1000, contiguous amino acids) having at least 85%, at least 90%, at least 95%, at least 98%, at least 99%, or 100%, amino acid sequence identity to corresponding stretches of from 50 to 1000 contiguous amino acids (e.g., from 50 to 75, from 75 to 100, from 100 to 150, from 150 to 200, from 200 to 250, from 250 to 300, from 300 to 350, from 350 to 400, from 400 to 450, from 450 to 500, from 500 to 600, from 600 to 700, from 700 to 800, from 800 to 900, or from 900 to 1000, contiguous amino acids) of the Spy Cas9 amino acid sequence depicted in FIG. 1.

[0082] In some cases, an RNA-guided effector polypeptide of the present disclosure comprising an “A” deletion, a “B” deletion, a “C” deletion, and a “D” deletion has a length of from about 615 amino acids to about 1310 amino acids, e.g., from about 615 amino acids (aa) to about 625 aa, from about 625 aa to about 650 aa, from about 650 aa to about 675 aa, from about 675 aa to about 700 aa, from about 700 aa to about 725 aa, from about 725 aa to about 750 aa, from about 750 aa to about 775 aa, from about 775 aa to about 800 aa, from about 800 aa to about 825 aa, from about 825 aa to about 850 aa, from about 850 aa to about 875 aa, from about 875 aa to about 900 aa, from about 900 aa to about 925 aa, from about 925 aa to about 950 aa, from about 950 aa to about 975 aa, from about 975 aa to about 1000 aa, from about 1000 aa to about 1025 aa, from about 1025 aa to about 1050 aa, from about 1050 aa to about 1075 aa, from about 1075 aa to about 1100 aa, from about 1100 aa to about 1125 aa, from about 1125 aa to about 1150 aa, from about 1150 aa to about 1175 aa, from about 1175 aa to about 1200 aa, from about 1200 aa to about 1225 aa, from about 1225 aa to about 1250 aa, from about 1250 aa to about 1275 aa, from about 1275 aa to about 1300 aa, or from about 1300 aa to about 1310 aa. In some cases, an RNA-guided effector polypeptide of the present disclosure comprising an “A” deletion, a “B” deletion, a “C” deletion, and a “D” deletion has a length of from about 870 aa to about 1000 aa. In some cases, an RNA-guided effector polypeptide of the present disclosure comprising an “A” deletion, a “B” deletion, a “C” deletion, and a “D” deletion has a length of from about 870 aa to about 900 aa. In some cases, an RNA-guided effector polypeptide of the present disclosure comprising an “A” deletion, a “B” deletion, a “C” deletion, and a “D” deletion has a length of from about 870 aa to about 875 aa.

### Examples of RNA-Guided Effector Polypeptides

[0083] As an example, in some cases, an RNA-guided effector polypeptide of the present disclosure comprises an amino acid sequence having at least at least 85%, at least 90%, at least 95%, at least 98%, at least 99%, or 100%, amino acid sequence identity to the amino acid sequence of the D3CE polypeptide depicted in FIG. 3. The D3CE polypeptide depicted in FIG. 3 comprises a “B” deletion of amino acids 503-708, a “C” deletion of amino acids 792-897, and a “D” deletion of amino acids 1010-1081, compared to the amino acid numbering of the SpyCas9 amino acid sequence set forth in FIG. 1. The locations of the deletions, relative to the SpyCas9 amino acid sequence set forth in FIG. 1, are depicted in FIG. 5A-5B. D3CE has a length of 987 amino acids.

[0084] As another example, in some cases, an RNA-guided effector polypeptide of the present disclosure comprises an amino acid sequence having at least at least 85%, at least 90%, at least 95%, at least 98%, at least 99%, or 100%, amino acid sequence identity to the amino acid sequence of the D4CE polypeptide depicted in FIG. 4. The D4CE polypeptide depicted in FIG. 4 comprises an “A” deletion of amino acids 179-296, a “B” deletion of amino acids 503-708, a “C” deletion of amino acids 792-897, and a “D” deletion of amino acids 1010-1081, compared to the amino acid numbering of the SpyCas9 amino acid sequence set forth in FIG. 1. The locations of the deletions, relative to the SpyCas9 amino acid sequence set forth in FIG. 1, are depicted in FIG. 6A-6B. D4CE has a length of 874 amino acids.

[0085] As another example, in some cases, an RNA-guided effector polypeptide of the present disclosure comprises an amino acid sequence having at least at least 85%, at least 90%, at least 95%, at least 98%, at least 99%, or 100%, amino acid sequence identity to the amino acid sequence of the Variant 1 polypeptide depicted in FIG. 10B. As depicted in FIG. 10A, a Variant 1 polypeptide has an “A” deletion of amino acids 174-289 compared to the Spy Cas9 polypeptide depicted in FIG. 1; and has a length of about 1253 amino acids.

[0086] As another example, in some cases, an RNA-guided effector polypeptide of the present disclosure comprises an amino acid sequence having at least at least 85%, at least 90%, at least 95%, at least 98%, at least 99%, or 100%, amino acid sequence identity to the amino acid sequence of the Variant 2 polypeptide depicted in FIG. 11B. As depicted in FIG. 11A, a Variant 2 polypeptide has an “A” deletion of amino acids 174-306 compared to the Spy Cas9 polypeptide depicted in FIG. 1; and has a length of about 1235 amino acids.

[0087] As another example, in some cases, an RNA-guided effector polypeptide of the present disclosure comprises an amino acid sequence having at least at least 85%, at least 90%, at least 95%, at least 98%, at least 99%, or 100%, amino acid sequence identity to the amino acid sequence of the Variant 3 polypeptide depicted in FIG. 12B. As depicted in FIG. 12A, a Variant 3 polypeptide has an “A” deletion of amino acids 175-296 compared to the Spy Cas9 polypeptide depicted in FIG. 1; and has a length of about 1246 amino acids.

[0088] As another example, in some cases, an RNA-guided effector polypeptide of the present disclosure comprises an amino acid sequence having at least at least 85%, at least 90%, at least 95%, at least 98%, at least 99%, or 100%, amino acid sequence identity to the amino acid sequence of the Variant 4 polypeptide depicted in FIG. 13B. As depicted in FIG. 13A, a Variant 4 polypeptide has a “B” deletion of amino acids 522-702 compared to the Spy Cas9 polypeptide depicted in FIG. 1; and has a length of about 1187 amino acids.

[0089] As another example, in some cases, an RNA-guided effector polypeptide of the present disclosure comprises an amino acid sequence having at least at least 85%, at least 90%, at least 95%, at least 98%, at least 99%, or 100%, amino acid sequence identity to the amino acid sequence of the Variant 5 polypeptide depicted in FIG. 14B. As depicted in FIG. 14A, a Variant 5 polypeptide has a “B” deletion of amino acids 537-704 compared to the Spy Cas9 polypeptide depicted in FIG. 1; and has a length of about 1200 amino acids.

[0090] As another example, in some cases, an RNA-guided effector polypeptide of the present disclosure comprises an amino acid sequence having at least at least 85%, at least 90%, at least 95%, at least 98%, at least 99%, or 100%, amino acid sequence identity to the amino acid sequence of the Variant 6 polypeptide depicted in FIG. 15B. As depicted in FIG. 15A, a Variant 6 polypeptide has a “B” deletion of amino acids 523-664 compared to the Spy Cas9 polypeptide depicted in FIG. 1; and has a length of about 1226 amino acids.

[0091] As another example, in some cases, an RNA-guided effector polypeptide of the present disclosure comprises an amino acid sequence having at least at least 85%, at least 90%, at least 95%, at least 98%, at least 99%, or 100%, amino acid sequence identity to the amino acid sequence of the Variant 7 polypeptide depicted in FIG. 16B. As depicted in FIG. 16A, a Variant 7 polypeptide has a “C” deletion of amino acids 781-906 compared to the Spy Cas9 polypeptide depicted in FIG. 1; and has a length of about 1242 amino acids.

[0092] As another example, in some cases, an RNA-guided effector polypeptide of the present disclosure comprises an amino acid sequence having at least at least 85%, at least 90%, at least 95%, at least 98%, at least 99%, or 100%, amino acid sequence identity to the amino acid sequence of the Variant 8 polypeptide depicted in FIG. 17B. As depicted in FIG. 17A, a Variant 8 polypeptide has a “C” deletion of amino acids 820-932 compared to the Spy Cas9 polypeptide depicted in FIG. 1; and has a length of about 1255 amino acids.

[0093] As another example, in some cases, an RNA-guided effector polypeptide of the present disclosure comprises an amino acid sequence having at least at least 85%, at least 90%, at least 95%, at least 98%, at least 99%, or 100%, amino acid sequence identity to the amino acid sequence of the Variant 9 polypeptide depicted in FIG. 18B. As depicted in FIG. 18A, a Variant 9 polypeptide has a “C” deletion of amino acids 769-910 compared to the Spy Cas9 polypeptide depicted in FIG. 1; and has a length of about 1226 amino acids.

[0094] As another example, in some cases, an RNA-guided effector polypeptide of the present disclosure comprises an amino acid sequence having at least at least 85%, at least 90%, at least 95%, at least 98%, at least 99%, or 100%, amino acid sequence identity to the amino acid sequence of the Variant 10 polypeptide depicted in FIG. 19B. As depicted in FIG. 19A, a Variant 10 polypeptide has: i) a “B” deletion of amino acids 508-649; ii) a “C” deletion of amino acids 768-900; and iii) a “D” deletion of amino acids 1010-1081 compared to the Spy Cas9 polypeptide depicted in FIG. 1; and has a length of about 1021 amino acids.

[0095] As another example, in some cases, an RNA-guided effector polypeptide of the present disclosure comprises an amino acid sequence having at least at least 85%, at least 90%, at least 95%, at least 98%, at least 99%, or 100%, amino acid sequence identity to the amino acid sequence of the Variant 11 polypeptide depicted in FIG. 20B. As depicted in FIG. 20A, a Variant 11 polypeptide has: i) a “B” deletion of amino acids 508-646; ii) a “C” deletion of amino acids 786-923; and iii) a “D” deletion of amino acids 1010-1081 compared to the Spy Cas9 polypeptide depicted in FIG. 1; and has a length of about 1019 amino acids.

[0096] As another example, in some cases, an RNA-guided effector polypeptide of the present disclosure comprises an amino acid sequence having at least at least 85%, at least 90%, at least 95%, at least 98%, at least 99%, or 100%, amino acid sequence identity to the amino acid sequence of the Variant 12 polypeptide depicted in FIG. 21B. As depicted in FIG. 21A, a Variant 12 polypeptide has: i) a “B” deletion of amino acids 509-650; ii) a “C” deletion of amino acids 776-923; and iii) a “D” deletion of amino acids 1010-1081 compared to the Spy Cas9 polypeptide depicted in FIG. 1; and has a length of about 1006 amino acids.

[0097] As another example, in some cases, an RNA-guided effector polypeptide of the present disclosure comprises an amino acid sequence having at least at least 85%, at least 90%, at least 95%, at least 98%, at least 99%, or 100%, amino acid sequence identity to the amino acid sequence of the Variant 13 polypeptide depicted in FIG. 22B. As depicted in FIG. 22A, a Variant 13 polypeptide has: i) a “B” deletion of amino acids 504-710; ii) a “C” deletion of amino acids 763-924; and iii) a “D” deletion of amino acids 1010-1081 compared to the Spy Cas9 polypeptide depicted in FIG. 1; and has a length of about 927 amino acids.

### Fusion Polypeptides Comprising an RNA-Guided Effector Polypeptide

[0098] The present disclosure provides a fusion polypeptide comprising: i) an RNA-guided effector polypeptide of the present disclosure; and ii) a heterologous fusion partner.

[0099] In some cases, the heterologous fusion partner is a polypeptide having a length of no more than 500 amino acids (aa), no more than 400 aa, no more than 300 aa, no more than 200 aa, or no more than 100 aa. In some cases, the heterologous fusion partner is a polypeptide having a length of from about 10 amino acids (aa) to about 25 aa, from about 25 aa to about 50 aa, from about 50 aa to about 100 aa, from about 100 aa to about 150 aa, from about 150 aa to about 200 aa, from about 200 aa to about 300 aa, from about 300 aa to about 400 aa, or from about 400 aa to about 500 aa.

[0100] The total length of the fusion polypeptide is in some cases from about 750 amino acids to about 1500 amino acids, e.g., from about 750 amino acids (aa) to about 775 aa, from about 775 aa to about 800 aa, from about 800 aa to about 825 aa, from about 825 aa to about 850 aa, from about 850 aa to about 875 aa, from about 875 aa to about 900 aa, from about 900 aa to about 925 aa, from about 925 aa to about 950 aa, from about 950 aa to about 975 aa, or from about 975 aa to about 1000 aa.

[0101] In other instances, the total length of the fusion polypeptide is from about 1000 amino acids to about 1500 amino acids, e.g., from about 1000 amino acids (aa) to about 1100 aa, from about 1100 aa to about 1200 aa, from about 1200 aa to about 1300 aa, from about 1300 aa to about 1400 aa, or from about 1400 aa to about 1500 aa. The total length of the fusion polypeptide is in some cases from about 1000 aa to about 1400 aa. The total length of the fusion polypeptide is in some cases from about 1000 aa to about 1300 aa. The total length of the fusion polypeptide is in some cases from about 1000 aa to about 1200 aa. The total length of the fusion polypeptide is in some cases from about 1000 aa to about 1100 aa.

[0102] Suitable heterologous fusion partners include, but are not limited to, enzymes that modify a nucleic acid; enzymes that modify a polypeptide (e.g., a polypeptide bounds to a target nucleic acid); non-enzymatic polypeptides that bind to a nucleic acid; and polypeptides that modify (e.g., control) transcription.

[0103] In some cases, the heterologous fusion partner exhibits nuclease activity, methyltransferase activity, demethylase activity, DNA repair activity, DNA damage activity, deamination activity, dismutase activity, alkylation activity, depurination activity, oxidation activity, pyrimidine dimer forming activity, integrase activity, transposase activity, recombinase activity, polymerase activity, ligase activity, helicase activity, photolyase activity or glycosylase activity. In some cases, the heterologous fusion partner exhibits nuclease activity. In some cases, the heterologous fusion partner introduces a double strand break in a target DNA. In some cases, the heterologous fusion partner modifies a target polypeptide associated with a target DNA. In some cases, the heterologous fusion partner exhibits methyltransferase activity, demethylase activity, acetyltransferase activity, deacetylase activity, kinase activity, phosphatase activity, ubiquitin ligase activity, deubiquitinating activity, adenylation activity, deadenylation activity, SUMOylating activity, deSUMOylating activity, ribosylation activity, deribosylation activity, myristoylation activity, or demyristoylation activity.

[0104] In some cases, the heterologous fusion partner is a nucleic acid-modifying enzyme. Examples of suitable nucleic acid-modifying enzymes include DNA editing enzymes; deaminases, such as activation induced deaminase and APOBEC proteins; nucleases; recombinases; glycosylases; methyltransferases; and the like. In other cases the heterologous fusion partner is a protein-modifying enzyme. For example, the heterologous fusion partner may be one that modifies a protein associated with a nucleic acid. Examples of suitable protein-modifying enzymes include histone-modifying enzymes, acetylases, kinases, methyltransferases, ubiquitin ligases, SUMO ligases, demethylases, deacetylases, phosphatases, and the like.

[0105] In some cases the fusion partner can modulate transcription (e.g., inhibit transcription, increase transcription) of a target DNA. For example, in some cases the fusion partner is a protein (or a domain from a protein) that inhibits transcription (e.g., a transcriptional repressor, a protein that functions via recruitment of transcription inhibitor proteins, modification of target DNA such as methylation, recruitment of a DNA modifier, modulation of histones associated with target DNA, recruitment of a histone modifier such as those that modify acetylation and/or methylation of histones, and the like). In some cases the fusion partner is a protein (or a domain from a protein) that increases transcription (e.g., a transcription activator, a protein that acts via recruitment of transcription activator proteins, modification of target DNA such as demethylation, recruitment of a DNA modifier, modulation of histones associated with target DNA, recruitment of a histone modifier such as those that modify acetylation and/or methylation of histones, and the like).

[0106] Examples of proteins (or fragments thereof) that can be used in increase transcription include but are not limited to: transcriptional activators such as VP16, VP64, VP48, VP160, p65 subdomain (e.g., from NFkB), and activation domain of EDLL and/or TAL activation domain (e.g., for activity in plants); histone lysine methyltransferases such as SET1A, SET1B, MLL1 to 5, ASH1, SYMD2, NSD1, and the like; histone lysine demethylases such as JHDM2a/b, UTX, JMJD3, and the like; histone acetyltransferases such as GCN5, PCAF, CBP, p300, TAF1, TIP60/PLIP, MOZ/MYST3, MORF/MYST4, SRC1, ACTR, P160, CLOCK, and the like; and DNA demethylases such as Ten-Eleven Translocation (TET) dioxygenase 1 (TET1CD), TET1, DME, DML1, DML2, ROS1, and the like.

[0107] Examples of proteins (or fragments thereof) that can be used in decrease transcription include but are not limited to: transcriptional repressors such as the Krüppel associated box (KRAB or SKD); KOX1 repression domain; the Mad mSIN3 interaction domain (SID); the ERF repressor domain (ERD), the SRDX repression domain (e.g., for repression in plants), and the like; histone lysine methyltransferases such as Pr-SET7/8, SUV4-20H1, RIZ1, and the like; histone lysine demethylases such as JMJD2A/JHDM3A, JMJD2B, JMJD2C/GASC1, JMJD2D, JARID1A/RBP2, JARID1B/PLU-1, JARID1C/SMCX, JARID1D/SMCY, and the like; histone lysine deacetylases such as HDAC1, HDAC2, HDAC3, HDAC8, HDAC4, HDAC5, HDAC7, HDAC9, SIRT1, SIRT2, HDAC11, and the like; DNA methylases such as HhaI DNA m5c-methyltransferase (M.HhaI), DNA methyltransferase 1 (DNMT1), DNA methyltransferase 3a (DNMT3a), DNA methyltransferase 3b (DNMT3b), METI, DRM3 (plants), ZMET2, CMT1, CMT2 (plants), and the like; and periphery recruitment elements such as Lamin A, Lamin B, and the like.

[0108] In some cases, the heterologous fusion partner is a nuclease that provides for cleavage of a double-stranded DNA. In some cases, the heterologous fusion partner is a nickase. In some cases, a fusion polypeptide of the present disclosure includes a heterologous polypeptide that has enzymatic activity that modifies a target nucleic acid (e.g., nuclease activity, methyltransferase activity, demethylase activity, DNA repair activity, DNA damage activity, deamination activity, dismutase activity, alkylation activity, depurination activity, oxidation activity, pyrimidine dimer forming activity, integrase activity, transposase activity, recombinase activity, polymerase activity, ligase activity, helicase activity, photolyase activity or glycosylase activity).

[0109] In some cases the fusion partner has enzymatic activity that modifies a protein associated with the target nucleic acid (e.g., ssRNA, dsRNA, ssDNA, dsDNA) (e.g., a histone, an RNA binding protein, a DNA binding protein, and the like). Examples of enzymatic activity (that modifies a protein associated with a target nucleic acid) that can be provided by the fusion partner include but are not limited to: methyltransferase activity such as that provided by a histone methyltransferase (HMT) (e.g., suppressor of variegation 3-9 homolog 1 (SUV39H1, also known as KMT1A), euchromatic histone lysine methyltransferase 2 (G9A, also known as KMT1C and EHMT2), SUV39H2, ESET/SETDB1, and the like, SET1A, SET1B, MLL1 to 5, ASH1, SYMD2, NSD1, DOT1L, Pr-SET7/8, SUV4-20H1, EZH2, RIZ1), demethylase activity such as that provided by a histone demethylase (e.g., Lysine Demethylase 1A (KDM1A also known as LSD1), JHDM2a/b, JMJD2A/JHDM3A, JMJD2B, JMJD2C/GASC1, JMJD2D, JARID1A/RBP2, JARID1B/PLU-1, JARID1C/SMCX, JARID1D/SMCY, UTX, JMJD3, and the like), acetyltransferase activity such as that provided by a histone acetylase transferase (e.g., catalytic core/fragment of the human acetyltransferase p300, GCN5, PCAF, CBP, TAF1, TIP60/PLIP, MOZ/MYST3, MORF/MYST4, HBO1/MYST2, HMOF/MYST1, SRC1, ACTR, P160, CLOCK, and the like), deacetylase activity such as that provided by a histone deacetylase (e.g., HDAC1, HDAC2, HDAC3, HDAC8, HDAC4, HDAC5, HDAC7, HDAC9, SIRT1, SIRT2, HDAC11, and the like), kinase activity, phosphatase activity, ubiquitin ligase activity, deubiquitinating activity, adenylation activity, deadenylation activity, SUMOylating activity, deSUMOylating activity, ribosylation activity, deribosylation activity, myristoylation activity, and demyristoylation activity.

[0110] In some cases the fusion partner has enzymatic activity that modifies the target nucleic acid (e.g., ssRNA, dsRNA, ssDNA, dsDNA). Examples of enzymatic activity that can be provided by the fusion partner include but are not limited to: nuclease activity such as that provided by a restriction enzyme (e.g., FokI nuclease), methyltransferase activity such as that provided by a methyltransferase (e.g., HhaI DNA m5c-methyltransferase (M.HhaI), DNA methyltransferase 1 (DNMT1), DNA methyltransferase 3a (DNMT3a), DNA methyltransferase 3b (DNMT3b), METI, DRM3 (plants), ZMET2, CMT1, CMT2 (plants), and the like); demethylase activity such as that provided by a demethylase (e.g., Ten-Eleven Translocation (TET) dioxygenase 1 (TET1CD), TET1, DME, DML1, DML2, ROS1, and the like), DNA repair activity, DNA damage activity, deamination activity such as that provided by a deaminase (e.g., a cytosine deaminase enzyme such as rat APOBEC1), dismutase activity, alkylation activity, depurination activity, oxidation activity, pyrimidine dimer forming activity, integrase activity such as that provided by an integrase and/or resolvase (e.g., Gin invertase such as the hyperactive mutant of the Gin invertase, GinH106Y; human immunodeficiency virus type 1 integrase (IN); Tn3 resolvase; and the like), transposase activity, recombinase activity such as that provided by a recombinase (e.g., catalytic domain of Gin recombinase), polymerase activity, ligase activity, helicase activity, photolyase activity, and glycosylase activity).

[0111] As one non-limiting example, in some cases, the heterologous fusion partner: i) is a FokI nuclease comprising an amino acid sequence having at least at least 85%, at least 90%, at least 95%, at least 98%, at least 99%, or 100%, amino acid sequence identity to the FokI polypeptide depicted in FIG. 7A or FIG. 7B; and ii) has a length of from about 195 amino acids to about 200 amino acids.

[0112] In some cases, the heterologous fusion partner is a deaminase. Suitable deaminases include a cytidine deaminase and an adenosine deaminase.

[0113] In some cases, a suitable deaminase provides for generation of a G→T substitution. In some cases, a suitable deaminase provides for generation of a G→C substitution. In some cases, a suitable deaminase provides for generation of a C→A substitution. In some cases, a suitable deaminase provides for generation of a C→G substitution. In some cases, a suitable deaminase provides for generation of an A→T substitution. In some cases, a suitable deaminase provides for generation of an A→G substitution. In some cases, a suitable deaminase provides for generation of an A→C substitution. In some cases, a suitable deaminase provides for generation of a T→A substitution. In some cases, a suitable deaminase provides for generation of a T→G substitution. In some cases, a suitable deaminase provides for generation of a T→C substitution. In some cases, a suitable deaminase provides for generation of a G→A substitution. In some cases, a suitable deaminase provides for generation of a C→T substitution.

[0114] Adenosine deaminases suitable as heterologous fusion partners include any enzyme that is capable of deaminating adenosine in DNA. In some cases, the deaminase is a TadA deaminase.

[0115] In some cases, a suitable adenosine deaminase comprises an amino acid sequence having at least 80%, at least 85%, at least 90%, at least 95%, at least 98%, at least 99%, or 100%, amino acid sequence identity to the following amino acid sequence:

(SEQ ID NO: 1)
MSEVEFSHEYWMRHALTLAKRAWDEREVPVGAVLVHNNRVIGEGWNRPIGR
HDPTAHAEIMALRQGGLVMQNYRLIDATLYVTLEPCVMCAGAMIHSRIGRV
VFGARDAKTGAAGSLMDVLHHPGMNHRVEITEGILADECAALLSDFFRMRR
QEIKAQKKAQSSTD

[0116] In some cases, a suitable adenosine deaminase comprises an amino acid sequence having at least 80%, at least 85%, at least 90%, at least 95%, at least 98%, at least 99%, or 100%, amino acid sequence identity to the following amino acid sequence:

(SEQ ID NO: 2)
MRRAFITGVFFLSEVEFSHEYWMRHALTLAKRAWDEREVPVGAVLVHNNRV
IGEGWNRPIGRHDPTAHAEIMALRQGGLVMQNYRLIDATLYVTLEPCVMCA
GAMIHSRIGRVVFGARDAKTGAAGSLMDVLHHPGMNHRVEITEGILADECA
ALLSDFFRMRRQEIKAQKKAQSSTD.

[0117] In some cases, a suitable adenosine deaminase comprises an amino acid sequence having at least 80%, at least 85%, at least 90%, at least 95%, at least 98%, at least 99%, or 100%, amino acid sequence identity to the following Staphylococcus aureus TadA amino acid sequence:

(SEQ ID NO: 3)
MGSHMTNDIYFMTLAIEEAKKAAQLGEVPIGAIITKDDEVIARAHNLRETL
QQPTAHAEHIAIERAAKVLGSWRLEGCTLYVTLEPCVMCAGTIVMSRIPRV
VYGADDPKGGCSGSLMNLLQQSNFNHRAIVDKGVLKEACSTLLTTFFKNLR
ANKKSTN:

[0118] In some cases, a suitable adenosine deaminase comprises an amino acid sequence having at least 80%, at least 85%, at least 90%, at least 95%, at least 98%, at least 99%, or 100%, amino acid sequence identity to the following Bacillus subtilis TadA amino acid sequence:

(SEQ ID NO: 4)
MTQDELYMKEAIKEAKKAEEKGEVPIGAVLVINGEIIARAHNLRETEQRSI
AHAEMLVIDEACKALGTWRLEGATLYVTLEPCPMCAGAVVLSRVEKVVFGA
FDPKGGCSGTLMNLLQEERFNHQAEVVSGVLEEECGGMLSAFFRELRKKKK
AARKNLSE

[0119] In some cases, a suitable adenosine deaminase comprises an amino acid sequence having at least 80%, at least 85%, at least 90%, at least 95%, at least 98%, at least 99%, or 100%, amino acid sequence identity to the following Salmonella typhimurium TadA:

(SEQ ID NO: 817)
MPPAFITGVTSLSDVELDHEYWMRHALTLAKRAWDEREVPVGAVLVHNHRV
IGEGWNRPIGRHDPTAHAEIMALRQGGLVLQNYRLLDTTLYVTLEPCVMCA
GAMVHSRIGRVVFGARDAKTGAAGSLIDVLHHPGMNHRVEIIEGVLRDECA
TLLSDFFRMRRQEIKALKKADRAEGAGPAV.

[0120] In some cases, a suitable adenosine deaminase comprises an amino acid sequence having at least 80%, at least 85%, at least 90%, at least 95%, at least 98%, at least 99%, or 100%, amino acid sequence identity to the following Shewanella putrefaciens TadA amino acid sequence:

(SEQ ID NO: 818)
MDEYWMQVAMQMAEKAEAAGEVPVGAVLVKDGQQIATGYNLSISQHDPTAH
AEILCLRSAGKKLENYRLLDATLYITLEPCAMCAGAMVHSRIARVVYGARD
EKTGAAGTVVNLLQHPAFNHQVEVTSGVLAEACSAQLSRFFKRRRDEKKAL
KLAQRAQQGIE

[0121] In some cases, a suitable adenosine deaminase comprises an amino acid sequence having at least 80%, at least 85%, at least 90%, at least 95%, at least 98%, at least 99%, or 100%, amino acid sequence identity to the following Haemophilus influenzae F3031 TadA amino acid sequence:

(SEQ ID NO: 819)
MDAAKVRSEFDEKMMRYALELADKAEALGEIPVGAVLVDDARNIIGEGWNL
SIVQSDPTAHAEIIALRNGAKNIQNYRLLNSTLYVTLEPCTMCAGAILHSR
IKRLVFGASDYKTGAIGSRFHFFDDYKMNHTLEITSGVLAEECSQKLSTFF
QKRREEKKIEKALLKSLSDK

[0122] In some cases, a suitable adenosine deaminase comprises an amino acid sequence having at least 80%, at least 85%, at least 90%, at least 95%, at least 98%, at least 99%, or 100%, amino acid sequence identity to the following Caulobacter crescentus TadA amino acid sequence:

(SEQ ID NO: 820)
MRTDESEDQDHRMMRLALDAARAAAEAGETPVGAVILDPSTGEVIATAGNG
PIAAHDPTAHAEIAAMRAAAAKLGNYRLTDLTLVVTLEPCAMCAGAISHAR
IGRVVFGADDPKGGAVVHGPKFFAQPTCHWRPEVTGGVLADESADLLRGFF
RARRKAKI

[0123] In some cases, a suitable adenosine deaminase comprises an amino acid sequence having at least 80%, at least 85%, at least 90%, at least 95%, at least 98%, at least 99%, or 100%, amino acid sequence identity to the following Geobacter sulfurreducens TadA amino acid sequence:

(SEQ ID NO: 821)
MSSLKKTPIRDDAYWMGKAIREAAKAAARDEVPIGAVIVRDGAVIGRGHNL
REGSNDPSAHAEMIAIRQAARRSANWRLTGATLYVTLEPCLMCMGAIILAR
LERVVFGCYDPKGGAAGSLYDLSADPRLNHQVRLSPGVCQEECGTMLSDFF
RDLRRRKKAKATPALFIDERKVPPEP

[0124] Cytidine deaminases suitable as heterologous fusion partners include any enzyme that is capable of deaminating cytidine in DNA.

[0125] In some cases, the cytidine deaminase is a deaminase from the apolipoprotein B mRNA-editing complex (APOBEC) family of deaminases. In some cases, the APOBEC family deaminase is selected from the group consisting of APOBEC1 deaminase, APOBEC2 deaminase, APOBEC3A deaminase, APOBEC3B deaminase, APOBEC3C deaminase, APOBEC3D deaminase, APOBEC3F deaminase, APOBEC3G deaminase, and APOBEC3H deaminase. In some cases, the cytidine deaminase is an activation induced deaminase (AID).

[0126] In some cases, a suitable cytidine deaminase comprises an amino acid sequence having at least 80%, at least 85%, at least 90%, at least 95%, at least 98%, at least 99%, or 100%, amino acid sequence identity to the following amino acid sequence:

(SEQ ID NO: 822)
[sequence omitted]

[0127] In some cases, a suitable cytidine deaminase is an AID and comprises an amino acid sequence having at least 80%, at least 85%, at least 90%, at least 95%, at least 98%, at least 99%, or 100%, amino acid sequence identity to the following amino acid sequence: MDSLLMNRRK

(SEQ ID NO: 823)
FLYQFKNVRW AKGRRETYLC YVVKRRDSAT SFSLDFGYLR
NKNGCHVELL FLRYISDWDL DPGRCYRVTW FTSWSPCYDC
ARHVADFLRG NPNLSLRIFT ARLYFCEDRK AEPEGLRRLH
RAGVQIAIMT FKENHERTFK AWEGLHENSV RLSRQLRRIL
LPLYEVDDLR DAFRTLGL.

[0128] In some cases, a suitable cytidine deaminase is an AID and comprises an amino acid sequence having at least 80%, at least 85%, at least 90%, at least 95%, at least 98%, at least 99%, or 100%, amino acid sequence identity to the following amino acid sequence: MDSLLMNRRK

(SEQ ID NO: 824)
FLYQFKNVRW AKGRRETYLC YVVKRRDSAT SFSLDFGYLR
NKNGCHVELL FLRYISDWDL DPGRCYRVTW FTSWSPCYDC
ARHVADFLRG NPNLSLRIFT ARLYFCEDRK AEPEGLRRLH
RAGVQIAIMT FKDYFYCWNT FVENHERTFK AWEGLHENSV
RLSRQLRRIL LPLYEVDDLR DAFRTLGL.

### Additional Polypeptides

[0129] In some cases, a fusion polypeptide of the present disclosure comprises one or more additional polypeptides, where suitable additional polypeptides include, e.g., a nuclear localization signal (NLS), a cell-penetrating peptide (CPP), an endosomolytic peptide, and the like. In some cases, a heterologous polypeptide (a fusion partner) provides for subcellular localization, i.e., the heterologous polypeptide contains a subcellular localization sequence (e.g., a nuclear localization signal (NLS) for targeting to the nucleus, a sequence to keep the fusion protein out of the nucleus, e.g., a nuclear export sequence (NES), a sequence to keep the fusion protein retained in the cytoplasm, a mitochondrial localization signal for targeting to the mitochondria, a chloroplast localization signal for targeting to a chloroplast, an ER retention signal, and the like). In some cases, a fusion polypeptide of the present disclosure does not include a NLS so that the protein is not targeted to the nucleus. In some cases, the heterologous polypeptide can provide a tag (i.e., the heterologous polypeptide is a detectable label) for ease of tracking and/or purification (e.g., a fluorescent protein, e.g., green fluorescent protein (GFP), yellow fluorescent protein (YFP), red fluorescent protein (RFP), cyan fluorescent protein (CFP), mCherry, tdTomato, and the like; a histidine tag, e.g., a 6×His tag; a hemagglutinin (HA) tag; a FLAG tag; a Myc tag; and the like).

[0130] In some cases, a fusion polypeptide of the present disclosure includes (is fused to) a nuclear localization signal (NLS) (e.g., in some cases 2 or more, 3 or more, 4 or more, or 5 or more NLSs). Thus, in some cases, a fusion polypeptide of the present disclosure includes one or more NLSs (e.g., 2 or more, 3 or more, 4 or more, or 5 or more NLSs). In some cases, one or more NLSs (2 or more, 3 or more, 4 or more, or 5 or more NLSs) are positioned at or near (e.g., within 50 amino acids of) the N-terminus and/or the C-terminus. In some cases, one or more NLSs (2 or more, 3 or more, 4 or more, or 5 or more NLSs) are positioned at or near (e.g., within 50 amino acids of) the N-terminus. In some cases, one or more NLSs (2 or more, 3 or more, 4 or more, or 5 or more NLSs) are positioned at or near (e.g., within 50 amino acids of) the C-terminus. In some cases, one or more NLSs (3 or more, 4 or more, or 5 or more NLSs) are positioned at or near (e.g., within 50 amino acids of) both the N-terminus and the C-terminus. In some cases, an NLS is positioned at the N-terminus and an NLS is positioned at the C-terminus.

[0131] Non-limiting examples of NLSs include an NLS sequence derived from: the NLS of the SV40 virus large T-antigen, having the amino acid sequence PKKKRKV (SEQ ID NO: 825); the NLS from nucleoplasmin (e.g., the nucleoplasmin bipartite NLS with the sequence KRPAATKKAGQAKKKK (SEQ ID NO: 826)); the c-myc NLS having the amino acid sequence PAAKRVKLD (SEQ ID NO: 827) or RQRRNELKRSP (SEQ ID NO:828); the hRNPA1 M9 NLS having the sequence NQSSNFGPMKGGNFGGRSSGPYGGGGQYFAKPRNQGGY (SEQ ID NO: 829); the sequence RMRIZFKNKGKDTAELRRRRVEVSVELRKAKKDEQILKRRNV (SEQ ID NO: 830) of the IBB domain from importin-alpha; the sequences VSRKRPRP (SEQ ID NO: 831) and PPKKARED (SEQ ID NO: 832) of the myoma T protein; the sequence PQPKKKPL (SEQ ID NO: 833) of human p53; the sequence SALIKKKKKMAP (SEQ ID NO: 834) of mouse c-abl IV; the sequences DRLRR (SEQ ID NO: 835) and PKQKKRK (SEQ ID NO: 836) of the influenza virus NS1; the sequence RKLKKKIKKL (SEQ ID NO: 837) of the Hepatitis virus delta antigen; the sequence REKKKFLKRR (SEQ ID NO: 838) of the mouse Mx1 protein; the sequence KRKGDEVDGVDEVAKKKSKK (SEQ ID NO: 839) of the human poly(ADP-ribose) polymerase; and the sequence RKCLQAGMNLEARKTKK (SEQ ID NO: 840) of the steroid hormone receptors (human) glucocorticoid. In general, NLS (or multiple NLSs) are of sufficient strength to drive accumulation of the protein in a detectable amount in the nucleus of a eukaryotic cell. Detection of accumulation in the nucleus may be performed by any suitable technique.

[0132] In some cases, a fusion polypeptide of the present disclosure comprises: a) an RNA-guided effector polypeptide of the present disclosure; and b) a chloroplast transit peptide. Thus, for example, an RNA-guided effector polypeptide/guide RNA complex can be targeted to the chloroplast. In some cases, this targeting may be achieved by the presence of an N-terminal extension, called a chloroplast transit peptide (CTP) or plastid transit peptide. Chromosomal transgenes from bacterial sources must have a sequence encoding a CTP sequence fused to a sequence encoding an expressed polypeptide if the expressed polypeptide is to be compartmentalized in the plant plastid (e.g. chloroplast). Accordingly, localization of an exogenous polypeptide to a chloroplast is often 1 accomplished by means of operably linking a polynucleotide sequence encoding a CTP sequence to the 5′ region of a polynucleotide encoding the exogenous polypeptide. The CTP is removed in a processing step during translocation into the plastid. Processing efficiency may, however, be affected by the amino acid sequence of the CTP and nearby sequences at the N-terminus of the peptide. Other options for targeting to the chloroplast which have been described are the maize cab-m7 signal sequence (U.S. Pat. No. 7,022,896, WO 97/41228) a pea glutathione reductase signal sequence (WO 97/41228) and the CTP described in US2009029861.

[0133] In some cases, a fusion polypeptide of the present disclosure can comprise: a) an RNA-guided effector polypeptide of the present disclosure; and b) an endosomal escape peptide. In some cases, an endosomal escape polypeptide comprises the amino acid sequence GLFXALLXLLXSLWXLLLXA (SEQ ID NO:841), wherein each X is independently selected from lysine, histidine, and arginine. In some cases, an endosomal escape polypeptide comprises the amino acid sequence GLFHALLHLLHSLWHLLLHA (SEQ ID NO:842).

[0134] In some instances, an RNA-guided effector polypeptide of the present disclosure is fused to a fusion partner via a linker polypeptide (e.g., one or more linker polypeptides). The linker polypeptide may have any of a variety of amino acid sequences. Proteins can be joined by a spacer peptide, generally of a flexible nature, although other chemical linkages are not excluded. Suitable linkers include polypeptides of between 4 amino acids and 40 amino acids in length, or between 4 amino acids and 25 amino acids in length. These linkers can be produced by using synthetic, linker-encoding oligonucleotides to couple the proteins, or can be encoded by a nucleic acid sequence encoding the fusion protein. Peptide linkers with a degree of flexibility can be used. The linking peptides may have virtually any amino acid sequence, bearing in mind that the preferred linkers will have a sequence that results in a generally flexible peptide. The use of small amino acids, such as glycine and alanine, are of use in creating a flexible peptide. The creation of such sequences is routine to those of skill in the art. A variety of different linkers are commercially available and are considered suitable for use.

[0135] Examples of linker polypeptides include glycine polymers, glycine-serine polymers (including, for example, GSGGS (SEQ ID NO: 843), GGSGGS (SEQ ID NO: 844), and GGGS (SEQ ID NO: 845), glycine-alanine polymers, alanine-serine polymers. Exemplary linkers can comprise amino acid sequences including, but not limited to, GGSG (SEQ ID NO: 846), GGSGG (SEQ ID NO: 847), GSGSG (SEQ ID NO: 848), GSGGG (SEQ ID NO: 849), GGGSG (SEQ ID NO: 850), GSSSG (SEQ ID NO: 851), GGGGS (SEQ ID NO:852) and the like. The ordinarily skilled artisan will recognize that design of a peptide conjugated to any desired element can include linkers that are all or partially flexible, such that the linker can include a flexible linker as well as one or more portions that confer less flexible structure.

### Nucleic Acids and Recombinant Expression Vectors

[0136] The present disclosure provides a nucleic acid comprising a nucleotide sequence encoding an RNA-guided effector polypeptide of the present disclosure. The present disclosure provides a nucleic acid comprising a nucleotide sequence encoding a fusion polypeptide of the present disclosure.

[0137] The present disclosure provides one or more nucleic acids comprising one or more of: a donor polynucleotide sequence, a nucleotide sequence encoding an RNA-guided effector polypeptide of the present disclosure, a guide RNA, and a nucleotide sequence encoding a guide RNA (which can include two separate nucleotide sequences in the case of dual guide RNA format or which can include a singe nucleotide sequence in the case of single guide RNA format).

[0138] The present disclosure provides a recombinant expression vector that comprises a nucleotide sequence encoding an RNA-guided effector polypeptide of the present disclosure. The present disclosure provides a recombinant expression vector that comprises a nucleotide sequence encoding a fusion polypeptide of the present disclosure. The present disclosure provides a recombinant expression vector that comprises: a) a nucleotide sequence encoding an RNA-guided effector polypeptide of the present disclosure; and b) a nucleotide sequence encoding a guide RNA(s). The present disclosure provides a recombinant expression vector that comprises: a) a nucleotide sequence encoding an RNA-guided effector polypeptide of the present disclosure; and b) a nucleotide sequence encoding a guide RNA(s). In some cases, the nucleotide sequence encoding the RNA-guided effector protein and/or the nucleotide sequence encoding the guide RNA is operably linked to a promoter that is operable in a cell type of choice (e.g., a prokaryotic cell, a eukaryotic cell, a plant cell, an animal cell, a mammalian cell, a primate cell, a rodent cell, a human cell, etc.).

[0139] In some cases, a nucleotide sequence encoding an RNA-guided effector polypeptide of the present disclosure is codon optimized. This type of optimization can entail a mutation of an RNA-guided effector polypeptide-encoding nucleotide sequence to mimic the codon preferences of the intended host organism or cell while encoding the same protein. Thus, the codons can be changed, but the encoded protein remains unchanged. For example, if the intended target cell was a human cell, a human codon-optimized RNA-guided effector polypeptide-encoding nucleotide sequence could be used. As another non-limiting example, if the intended host cell were a mouse cell, then a mouse codon-optimized RNA-guided effector polypeptide-encoding nucleotide sequence could be generated. As another non-limiting example, if the intended host cell were a plant cell, then a plant codon-optimized RNA-guided effector polypeptide-encoding nucleotide sequence could be generated. As another non-limiting example, if the intended host cell were an insect cell, then an insect codon-optimized RNA-guided effector polypeptide-encoding nucleotide sequence could be generated.

[0140] The present disclosure provides one or more recombinant expression vectors that include (in different recombinant expression vectors in some cases, and in the same recombinant expression vector in some cases): (i) a nucleotide sequence of a donor template nucleic acid (where the donor template comprises a nucleotide sequence having homology to a target sequence of a target nucleic acid (e.g., a target genome)); (ii) a nucleotide sequence that encodes a guide RNA that hybridizes to a target sequence of the target locus of the targeted genome (e.g., a single or dual guide RNA) (e.g., operably linked to a promoter that is operable in a target cell such as a eukaryotic cell); and (iii) a nucleotide sequence encoding RNA-guided effector polypeptide of the present disclosure, or a fusion polypeptide of the present disclosure (e.g., operably linked to a promoter that is operable in a target cell such as a eukaryotic cell). The present disclosure provides one or more recombinant expression vectors that include (in different recombinant expression vectors in some cases, and in the same recombinant expression vector in some cases): (i) a nucleotide sequence of a donor template nucleic acid (where the donor template comprises a nucleotide sequence having homology to a target sequence of a target nucleic acid (e.g., a target genome)); and (ii) a nucleotide sequence that encodes a guide RNA that hybridizes to a target sequence of the target locus of the targeted genome (e.g., a single or dual guide RNA) (e.g., operably linked to a promoter that is operable in a target cell such as a eukaryotic cell). The present disclosure provides one or more recombinant expression vectors that include (in different recombinant expression vectors in some cases, and in the same recombinant expression vector in some cases): (i) a nucleotide sequence that encodes a guide RNA that hybridizes to a target sequence of the target locus of the targeted genome (e.g., a single or dual guide RNA) (e.g., operably linked to a promoter that is operable in a target cell such as a eukaryotic cell); and (ii) a nucleotide sequence encoding an RNA-guided effector polypeptide of the present disclosure or a fusion polypeptide of the present disclosure (e.g., operably linked to a promoter that is operable in a target cell such as a eukaryotic cell).

[0141] Suitable expression vectors include viral expression vectors (e.g. viral vectors based on vaccinia virus; poliovirus; adenovirus (see, e.g., Li et al., Invest Opthalmol Vis Sci 35:2543 2549, 1994; Borras et al., Gene Ther 6:515 524, 1999; Li and Davidson, PNAS 92:7700 7704, 1995; Sakamoto et al., Gene Ther 5:1088 1097, 1999; WO 94/12649, WO 93/03769; WO 93/19191; WO 94/28938; WO 95/11984 and WO 95/00655); adeno-associated virus (AAV) (see, e.g., Ali et al., Hum Gene Ther 9:81 86, 1998, Flannery et al., PNAS 94:6916 6921, 1997; Bennett et al., Invest Opthalmol Vis Sci 38:2857 2863, 1997; Jomary et al., Gene Ther 4:683 690, 1997, Rolling et al., Hum Gene Ther 10:641 648, 1999; Ali et al., Hum Mol Genet 5:591 594, 1996; Srivastava in WO 93/09239, Samulski et al., J. Vir. (1989) 63:3822-3828; Mendelson et al., Virol. (1988) 166:154-165; and Flotte et al., PNAS (1993) 90:10613-10617); SV40; herpes simplex virus; human immunodeficiency virus (see, e.g., Miyoshi et al., PNAS 94:10319 23, 1997; Takahashi et al., J Virol 73:7812 7816, 1999); a retroviral vector (e.g., Murine Leukemia Virus, spleen necrosis virus, and vectors derived from retroviruses such as Rous Sarcoma Virus, Harvey Sarcoma Virus, avian leukosis virus, a lentivirus, human immunodeficiency virus, myeloproliferative sarcoma virus, and mammary tumor virus); and the like. In some cases, a recombinant expression vector of the present disclosure is a recombinant adeno-associated virus (AAV) vector. In some cases, a recombinant expression vector of the present disclosure is a recombinant lentivirus vector. In some cases, a recombinant expression vector of the present disclosure is a recombinant retroviral vector.

[0142] Depending on the host/vector system utilized, any of a number of suitable transcription and translation control elements, including constitutive and inducible promoters, transcription enhancer elements, transcription terminators, etc. may be used in the expression vector.

[0143] In some embodiments, a nucleotide sequence encoding a guide RNA is operably linked to a control element, e.g., a transcriptional control element, such as a promoter. In some embodiments, a nucleotide sequence encoding an RNA-guided effector polypeptide of the present disclosure or a fusion polypeptide of the present disclosure is operably linked to a control element, e.g., a transcriptional control element, such as a promoter.

[0144] The transcriptional control element can be a promoter. In some cases, the promoter is a constitutively active promoter. In some cases, the promoter is a regulatable promoter. In some cases, the promoter is an inducible promoter. In some cases, the promoter is a tissue-specific promoter. In some cases, the promoter is a cell type-specific promoter. In some cases, the transcriptional control element (e.g., the promoter) is functional in a targeted cell type or targeted cell population. For example, in some cases, the transcriptional control element can be functional in eukaryotic cells, e.g., hematopoietic stem cells (e.g., mobilized peripheral blood (mPB) CD34(+) cell, bone marrow (BM) CD34(+) cell, etc.).

[0145] Non-limiting examples of eukaryotic promoters (promoters functional in a eukaryotic cell) include EF1α, those from cytomegalovirus (CMV) immediate early, herpes simplex virus (HSV) thymidine kinase, early and late SV40, long terminal repeats (LTRs) from retrovirus, and mouse metallothionein-I. Selection of the appropriate vector and promoter is well within the level of ordinary skill in the art. Non-limiting examples of tissue specific promoters include Syn1 (neurons); GFAP (astrocytes); B29 (B cells); hAAT (liver); albumin (liver); MCR (muscle); SPB (lung), and the like. The expression vector may also contain a ribosome binding site for translation initiation and a transcription terminator. The expression vector may also include appropriate sequences for amplifying expression. The expression vector may also include nucleotide sequences encoding protein tags (e.g., 6×His tag, hemagglutinin tag, fluorescent protein, etc.) that can be fused to the RNA-guided effector polypeptide of the present disclosure.

[0146] In some cases, a nucleotide sequence encoding a guide RNA and/or an RNA-guided effector polypeptide of the present disclosure or a fusion polypeptide of the present disclosure is operably linked to an inducible promoter. In some cases, a nucleotide sequence encoding a guide RNA and/or an RNA-guided effector polypeptide of the present disclosure or a fusion polypeptide of the present disclosure is operably linked to a constitutive promoter.

[0147] A promoter can be a constitutively active promoter (i.e., a promoter that is constitutively in an active/“ON” state), it may be an inducible promoter (i.e., a promoter whose state, active/“ON” or inactive/“OFF”, is controlled by an external stimulus, e.g., the presence of a particular temperature, compound, or protein), it may be a spatially restricted promoter (i.e., transcriptional control element, enhancer, etc.)(e.g., tissue specific promoter, cell type specific promoter, etc.), and it may be a temporally restricted promoter (i.e., the promoter is in the “ON” state or “OFF” state during specific stages of embryonic development or during specific stages of a biological process, e.g., hair follicle cycle in mice).

[0148] Suitable promoters can be derived from viruses and can therefore be referred to as viral promoters, or they can be derived from any organism, including prokaryotic or eukaryotic organisms. Suitable promoters can be used to drive expression by any RNA polymerase (e.g., pol I, pol II, pol III). Exemplary promoters include, but are not limited to the SV40 early promoter, mouse mammary tumor virus long terminal repeat (LTR) promoter; adenovirus major late promoter (Ad MLP); a herpes simplex virus (HSV) promoter, a cytomegalovirus (CMV) promoter such as the CMV immediate early promoter region (CMVIE), a rous sarcoma virus (RSV) promoter, a human U6 small nuclear promoter (U6) (Miyagishi et al., Nature Biotechnology 20, 497-500 (2002)), an enhanced U6 promoter (e.g., Xia et al., Nucleic Acids Res. 2003 Sep. 1; 31(17)), a human H1 promoter (H1), and the like.

[0149] In some cases, a nucleotide sequence encoding a guide RNA is operably linked to (under the control of) a promoter operable in a eukaryotic cell (e.g., a U6 promoter, an enhanced U6 promoter, an H1 promoter, and the like). As would be understood by one of ordinary skill in the art, when expressing an RNA (e.g., a guide RNA) from a nucleic acid (e.g., an expression vector) using a U6 promoter (e.g., in a eukaryotic cell), or another PolIII promoter, the RNA may need to be mutated if there are several Ts in a row (coding for Us in the RNA). This is because a string of Ts (e.g., 5 Ts) in DNA can act as a terminator for polymerase III (PolIII). Thus, in order to ensure transcription of a guide RNA (e.g., the activator portion and/or targeter portion, in dual guide or single guide format) in a eukaryotic cell it may sometimes be necessary to modify the sequence encoding the guide RNA to eliminate runs of Ts. In some cases, a nucleotide sequence encoding an RNA-guided effector polypeptide of the present disclosure or a fusion polypeptide of the present disclosure is operably linked to a promoter operable in a eukaryotic cell (e.g., a CMV promoter, an EF1α promoter, an estrogen receptor-regulated promoter, and the like).

[0150] Examples of inducible promoters include, but are not limited to T7 RNA polymerase promoter, T3 RNA polymerase promoter, Isopropyl-beta-D-thiogalactopyranoside (IPTG)-regulated promoter, lactose induced promoter, heat shock promoter, Tetracycline-regulated promoter, Steroid-regulated promoter, Metal-regulated promoter, estrogen receptor-regulated promoter, etc. Inducible promoters can therefore be regulated by molecules including, but not limited to, doxycycline; estrogen and/or an estrogen analog; IPTG; etc.

[0151] Inducible promoters suitable for use include any inducible promoter described herein or known to one of ordinary skill in the art. Examples of inducible promoters include, without limitation, chemically/biochemically-regulated and physically-regulated promoters such as alcohol-regulated promoters, rapamycin-regulated promoters, tetracycline-regulated promoters (e.g., anhydrotetracycline (aTc)-responsive promoters and other tetracycline-responsive promoter systems, which include a tetracycline repressor protein (tetR), a tetracycline operator sequence (tetO) and a tetracycline transactivator fusion protein (tTA)), steroid-regulated promoters (e.g., promoters based on the rat glucocorticoid receptor, human estrogen receptor, moth ecdysone receptors, and promoters from the steroid/retinoid/thyroid receptor superfamily), metal-regulated promoters (e.g., promoters derived from metallothionein (proteins that bind and sequester metal ions) genes from yeast, mouse and human), pathogenesis-regulated promoters (e.g., induced by salicylic acid, ethylene or benzothiadiazole (BTH)), temperature/heat-inducible promoters (e.g., heat shock promoters), and light-regulated promoters (e.g., light responsive promoters from plant cells).

[0152] In some cases, the promoter is a spatially restricted promoter (i.e., cell type specific promoter, tissue specific promoter, etc.) such that in a multi-cellular organism, the promoter is active (i.e., “ON”) in a subset of specific cells. Spatially restricted promoters may also be referred to as enhancers, transcriptional control elements, control sequences, etc. Any convenient spatially restricted promoter may be used as long as the promoter is functional in the targeted host cell (e.g., eukaryotic cell; prokaryotic cell).

[0153] In some cases, the promoter is a reversible promoter. Suitable reversible promoters, including reversible inducible promoters are known in the art. Such reversible promoters may be isolated and derived from many organisms, e.g., eukaryotes and prokaryotes. Modification of reversible promoters derived from a first organism for use in a second organism, e.g., a first prokaryote and a second a eukaryote, a first eukaryote and a second a prokaryote, etc., is well known in the art. Such reversible promoters, and systems based on such reversible promoters but also comprising additional control proteins, include, but are not limited to, alcohol regulated promoters (e.g., alcohol dehydrogenase I (alcA) gene promoter, promoters responsive to alcohol transactivator proteins (AlcR), etc.), tetracycline regulated promoters, (e.g., promoter systems including TetActivators, TetON, TetOFF, etc.), steroid regulated promoters (e.g., rat glucocorticoid receptor promoter systems, human estrogen receptor promoter systems, retinoid promoter systems, thyroid promoter systems, ecdysone promoter systems, mifepristone promoter systems, etc.), metal regulated promoters (e.g., metallothionein promoter systems, etc.), pathogenesis-related regulated promoters (e.g., salicylic acid regulated promoters, ethylene regulated promoters, benzothiadiazole regulated promoters, etc.), temperature regulated promoters (e.g., heat shock inducible promoters (e.g., HSP-70, HSP-90, soybean heat shock promoter, etc.), light regulated promoters, synthetic inducible promoters, and the like.

[0154] Methods of introducing a nucleic acid (e.g., a nucleic acid comprising a donor polynucleotide sequence, one or more nucleic acids encoding an RNA-guided effector polypeptide of the present disclosure or a fusion polypeptide of the present disclosure and/or a guide RNA, and the like) into a host cell are known in the art, and any convenient method can be used to introduce a nucleic acid (e.g., an expression construct) into a cell. Suitable methods include e.g., viral infection, transfection, lipofection, electroporation, calcium phosphate precipitation, polyethyleneimine (PEI)-mediated transfection, DEAE-dextran mediated transfection, liposome-mediated transfection, particle gun technology, calcium phosphate precipitation, direct microinjection, nanoparticle-mediated nucleic acid delivery, and the like.

[0155] Introducing the recombinant expression vector into cells can occur in any culture media and under any culture conditions that promote the survival of the cells. Introducing the recombinant expression vector into a target cell can be carried out in vivo or ex vivo. Introducing the recombinant expression vector into a target cell can be carried out in vitro.

[0156] In some embodiments, an RNA-guided effector polypeptide of the present disclosure or a fusion polypeptide of the present disclosure can be provided as RNA. The RNA can be provided by direct chemical synthesis or may be transcribed in vitro from a DNA (e.g., encoding the RNA-guided effector polypeptide of the present disclosure or the fusion polypeptide of the present disclosure). Once synthesized, the RNA may be introduced into a cell by any of the well-known techniques for introducing nucleic acids into cells (e.g., microinjection, electroporation, transfection, etc.).

[0157] Nucleic acids may be provided to the cells using well-developed transfection techniques; see, e.g. Angel and Yanik (2010) PLoS ONE 5(7): e11756, and the commercially available TransMessenger® reagents from Qiagen, Stemfect™ RNA Transfection Kit from Stemgent, and TransIT®-mRNA Transfection Kit from Minis Bio LLC. See also Beumer et al. (2008) PNAS 105(50):19821-19826.

[0158] Vectors may be provided directly to a target host cell. In other words, the cells are contacted with vectors comprising the subject nucleic acids (e.g., recombinant expression vectors having the donor template sequence and encoding the guide RNA; recombinant expression vectors encoding an RNA-guided effector polypeptide of the present disclosure or a fusion polypeptide of the present disclosure; etc.) such that the vectors are taken up by the cells. Methods for contacting cells with nucleic acid vectors that are plasmids, include electroporation, calcium chloride transfection, microinjection, and lipofection are well known in the art. For viral vector delivery, cells can be contacted with viral particles comprising the subject viral expression vectors.

[0159] Retroviruses, for example, lentiviruses, are suitable for use in methods of the present disclosure. Commonly used retroviral vectors are “defective”, i.e. unable to produce viral proteins required for productive infection. Rather, replication of the vector requires growth in a packaging cell line. To generate viral particles comprising nucleic acids of interest, the retroviral nucleic acids comprising the nucleic acid are packaged into viral capsids by a packaging cell line. Different packaging cell lines provide a different envelope protein (ecotropic, amphotropic or xenotropic) to be incorporated into the capsid, this envelope protein determining the specificity of the viral particle for the cells (ecotropic for murine and rat; amphotropic for most mammalian cell types including human, dog and mouse; and xenotropic for most mammalian cell types except murine cells). The appropriate packaging cell line may be used to ensure that the cells are targeted by the packaged viral particles. Methods of introducing subject vector expression vectors into packaging cell lines and of collecting the viral particles that are generated by the packaging lines are well known in the art. Nucleic acids can also introduced by direct micro-injection (e.g., injection of RNA).

[0160] Vectors used for providing the nucleic acids encoding a guide RNA and/or an RNA-guided effector polypeptide of the present disclosure or a fusion polypeptide of the present disclosure to a target host cell can include suitable promoters for driving the expression, that is, transcriptional activation, of the nucleic acid of interest. In other words, in some cases, the nucleic acid of interest will be operably linked to a promoter. This may include ubiquitously acting promoters, for example, the CMV-β-actin promoter, or inducible promoters, such as promoters that are active in particular cell populations or that respond to the presence of drugs such as tetracycline. By transcriptional activation, it is intended that transcription will be increased above basal levels in the target cell by 10 fold, by 100 fold, more usually by 1000 fold. In addition, vectors used for providing a nucleic acid encoding a guide RNA and/or an RNA-guided effector polypeptide of the present disclosure or a fusion polypeptide of the present disclosure to a cell may include nucleic acid sequences that encode for selectable markers in the target cells, so as to identify cells that have taken up the guide RNA and/or the RNA-guided effector polypeptide of the present disclosure or the fusion polypeptide of the present disclosure.

[0161] A nucleic acid comprising a nucleotide sequence encoding an RNA-guided effector polypeptide of the present disclosure, or a fusion polypeptide of the present disclosure, is in some cases an RNA. Thus, an RNA-guided effector polypeptide of the present disclosure or a fusion polypeptide of the present disclosure can be introduced into cells as RNA. Methods of introducing RNA into cells are known in the art and may include, for example, direct injection, transfection, incorporation of RNA into lipid nanoparticles, or any other method used for the introduction of DNA. An RNA-guided effector polypeptide of the present disclosure or a fusion polypeptide of the present disclosure protein may instead be provided to cells as a polypeptide. Such a polypeptide may optionally be fused to a polypeptide domain that increases solubility of the product. The domain may be linked to the polypeptide through a defined protease cleavage site, e.g. a TEV sequence, which is cleaved by TEV protease. The linker may also include one or more flexible sequences, e.g. from 1 to 10 glycine residues. In some embodiments, the cleavage of the fusion protein is performed in a buffer that maintains solubility of the product, e.g. in the presence of from 0.5 to 2 M urea, in the presence of polypeptides and/or polynucleotides that increase solubility, and the like. Domains of interest include endosomolytic domains, e.g. influenza HA domain; and other polypeptides that aid in production, e.g. IF2 domain, GST domain, GRPE domain, and the like. The polypeptide may be formulated for improved stability. For example, the peptides may be PEGylated, where the polyethyleneoxy group provides for enhanced lifetime in the blood stream.

[0162] Additionally or alternatively, an RNA-guided effector polypeptide of the present disclosure or a fusion polypeptide of the present disclosure may be fused to a polypeptide permeant domain to promote uptake by the cell. A number of permeant domains are known in the art and may be used in the non-integrating polypeptides of the present disclosure, including peptides, peptidomimetics, and non-peptide carriers. For example, a permeant peptide may be derived from the third alpha helix of Drosophila melanogaster transcription factor Antennapaedia, referred to as penetratin, which comprises the amino acid sequence RQIKIWFQNRRMKWKK (SEQ ID NO: 853). As another example, the permeant peptide comprises the HIV-1 tat basic region amino acid sequence, which may include, for example, amino acids 49-57 of naturally-occurring tat protein. Other permeant domains include polyarginine motifs, for example, the region of amino acids 34-56 of HIV-1 rev protein, nona-arginine, octa-arginine, and the like. (See, for example, Futaki et al. (2003) Curr Protein Pept Sci. 2003 April; 4(2): 87-9 and 446; and Wender et al. (2000) Proc. Natl. Acad. Sci. U.S.A 2000 Nov. 21; 97(24):13003-8; published U.S. Patent applications 20030220334; 20030083256; 20030032593; and 20030022831, herein specifically incorporated by reference for the teachings of translocation peptides and peptoids). The nona-arginine (R9) sequence is one of the more efficient PTDs that have been characterized (Wender et al. 2000; Uemura et al. 2002). The site at which the fusion is made may be selected in order to optimize the biological activity, secretion or binding characteristics of the polypeptide. The optimal site will be determined by routine experimentation.

[0163] An RNA-guided effector polypeptide of the present disclosure or a fusion polypeptide of the present disclosure may be produced in vitro or by eukaryotic cells or by prokaryotic cells, and it may be further processed by unfolding, e.g. heat denaturation, dithiothreitol reduction, etc. and may be further refolded, using methods known in the art.

[0164] Modifications of interest that do not alter primary sequence include chemical derivatization of polypeptides, e.g., acylation, acetylation, carboxylation, amidation, etc. Also included are modifications of glycosylation, e.g. those made by modifying the glycosylation patterns of a polypeptide during its synthesis and processing or in further processing steps; e.g. by exposing the polypeptide to enzymes which affect glycosylation, such as mammalian glycosylating or deglycosylating enzymes. Also embraced are sequences that have phosphorylated amino acid residues, e.g. phosphotyrosine, phosphoserine, or phosphothreonine.

[0165] Also suitable for inclusion in embodiments of the present disclosure are nucleic acids (e.g., encoding a guide RNA, encoding an RNA-guided effector polypeptide of the present disclosure or a fusion polypeptide of the present disclosure) that have been modified using ordinary molecular biological techniques and synthetic chemistry so as to improve their resistance to proteolytic degradation, to change the target sequence specificity, to optimize solubility properties, to alter protein activity (e.g., transcription modulatory activity, enzymatic activity, etc.) or to render them more suitable. Analogs of such polypeptides include those containing residues other than naturally occurring L-amino acids, e.g. D-amino acids or non-naturally occurring synthetic amino acids. D-amino acids may be substituted for some or all of the amino acid residues.

[0166] An RNA-guided effector polypeptide of the present disclosure or a fusion polypeptide of the present disclosure may be prepared by in vitro synthesis, using conventional methods as known in the art. Various commercial synthetic apparatuses are available, for example, automated synthesizers by Applied Biosystems, Inc., Beckman, etc. By using synthesizers, naturally occurring amino acids may be substituted with unnatural amino acids. The particular sequence and the manner of preparation will be determined by convenience, economics, purity required, and the like.

[0167] If desired, various groups may be introduced into the peptide during synthesis or during expression, which allow for linking to other molecules or to a surface. Thus cysteines can be used to make thioethers, histidines for linking to a metal ion complex, carboxyl groups for forming amides or esters, amino groups for forming amides, and the like.

[0168] An RNA-guided effector polypeptide of the present disclosure or a fusion polypeptide of the present disclosure may also be isolated and purified in accordance with conventional methods of recombinant synthesis. A lysate may be prepared of the expression host and the lysate purified using high performance liquid chromatography (HPLC), exclusion chromatography, gel electrophoresis, affinity chromatography, or other purification technique. For the most part, the compositions which are used will comprise 20% or more by weight of the desired product, e.g. 75% or more by weight, 95% or more by weight, or 99.5% or more by weight, in relation to contaminants related to the method of preparation of the product and its purification. Usually, the percentages will be based upon total protein. Thus, in some cases, an RNA-guided effector polypeptide of the present disclosure or a fusion polypeptide of the present disclosure is at least 80% pure, at least 85% pure, at least 90% pure, at least 95% pure, at least 98% pure, or at least 99% pure (e.g., free of contaminants, proteins other than the RNA-guided effector polypeptide of the present disclosure or the fusion polypeptide of the present disclosure or other macromolecules, etc.).

[0169] To induce cleavage or any desired modification to a target nucleic acid (e.g., genomic DNA), or any desired modification to a polypeptide associated with target nucleic acid, a guide RNA and/or an RNA-guided effector polypeptide of the present disclosure or a fusion polypeptide of the present disclosure and/or the donor template sequence, whether they be introduced as nucleic acids or polypeptides, are provided to the cells for about 30 minutes to about 24 hours, e.g., 1 hour, 1.5 hours, 2 hours, 2.5 hours, 3 hours, 3.5 hours 4 hours, 5 hours, 6 hours, 7 hours, 8 hours, 12 hours, 16 hours, 18 hours, 20 hours, or any other period from about 30 minutes to about 24 hours, which may be repeated with a frequency of about every day to about every 4 days, e.g., every 1.5 days, every 2 days, every 3 days, or any other frequency from about every day to about every four days. The agent(s) may be provided to the subject cells one or more times, e.g. one time, twice, three times, or more than three times, and the cells allowed to incubate with the agent(s) for some amount of time following each contacting event e.g. 16-24 hours, after which time the media is replaced with fresh media and the cells are cultured further.

[0170] In cases in which two or more different targeting complexes are provided to the cell (e.g., two different guide RNAs that are complementary to different sequences within the same or different target nucleic acid), the complexes may be provided simultaneously (e.g. as two polypeptides and/or nucleic acids), or delivered simultaneously. Alternatively, they may be provided consecutively, e.g. the targeting complex being provided first, followed by the second targeting complex, etc. or vice versa.

[0171] To improve the delivery of a DNA vector into a target cell, the DNA can be protected from damage and its entry into the cell facilitated, for example, by using lipoplexes and polyplexes. Thus, in some cases, a nucleic acid of the present disclosure (e.g., a recombinant expression vector of the present disclosure) can be covered with lipids in an organized structure like a micelle or a liposome. When the organized structure is complexed with DNA it is called a lipoplex. There are three types of lipids, anionic (negatively-charged), neutral, or cationic (positively-charged). Lipoplexes that utilize cationic lipids have proven utility for gene transfer. Cationic lipids, due to their positive charge, naturally complex with the negatively charged DNA. Also as a result of their charge, they interact with the cell membrane. Endocytosis of the lipoplex then occurs, and the DNA is released into the cytoplasm. The cationic lipids also protect against degradation of the DNA by the cell.

[0172] Complexes of polymers with DNA are called polyplexes. Most polyplexes consist of cationic polymers and their production is regulated by ionic interactions. One large difference between the methods of action of polyplexes and lipoplexes is that polyplexes cannot release their DNA load into the cytoplasm, so to this end, co-transfection with endosome-lytic agents (to lyse the endosome that is made during endocytosis) such as inactivated adenovirus must occur. However, this is not always the case; polymers such as polyethylenimine have their own method of endosome disruption as does chitosan and trimethylchitosan.

[0173] Dendrimers, a highly branched macromolecule with a spherical shape, may be also be used to genetically modify stem cells. The surface of the dendrimer particle may be functionalized to alter its properties. In particular, it is possible to construct a cationic dendrimer (i.e., one with a positive surface charge). When in the presence of genetic material such as a DNA plasmid, charge complementarity leads to a temporary association of the nucleic acid with the cationic dendrimer. On reaching its destination, the dendrimer-nucleic acid complex can be taken up into a cell by endocytosis.

[0174] In some cases, a nucleic acid of the disclosure (e.g., an expression vector) includes an insertion site for a guide sequence of interest. For example, a nucleic acid can include an insertion site for a guide sequence of interest, where the insertion site is immediately adjacent to a nucleotide sequence encoding the portion of a guide RNA that does not change when the guide sequence is changed to hybridized to a desired target sequence (e.g., sequences that contribute to the effector polypeptide binding aspect of the guide RNA, e.g., the sequences that contribute to the dsRNA duplex(es) of the guide RNA—this portion of the guide RNA can also be referred to as the ‘scaffold’ or ‘constant region’ of the guide RNA). Thus, in some cases, a subject nucleic acid (e.g., an expression vector) includes a nucleotide sequence encoding a guide RNA, except that the portion encoding the guide sequence portion of the guide RNA is an insertion sequence (an insertion site). An insertion site is any nucleotide sequence used for the insertion of a desired sequence. “Insertion sites” for use with various technologies are known to those of ordinary skill in the art and any convenient insertion site can be used. An insertion site can be for any method for manipulating nucleic acid sequences. For example, in some cases the insertion site is a multiple cloning site (MCS) (e.g., a site including one or more restriction enzyme recognition sequences), a site for ligation independent cloning, a site for recombination based cloning (e.g., recombination based on att sites), a nucleotide sequence recognized by a CRISPR/Cas (e.g. Cas9) based technology, a Cre site, a FLP site, and the like.

[0175] An insertion site can be any desirable length, and can depend on the type of insertion site (e.g., can depend on whether (and how many) the site includes one or more restriction enzyme recognition sequences, whether the site includes a target site for a CRISPR/Cas protein, etc.). In some cases, an insertion site of a subject nucleic acid is 3 or more nucleotides (nt) in length (e.g., 5 or more, 8 or more, 10 or more, 15 or more, 17 or more, 18 or more, 19 or more, 20 or more or 25 or more, or 30 or more nt in length). In some cases, the length of an insertion site of a subject nucleic acid has a length in a range of from 2 to 50 nucleotides (nt) (e.g., from 2 to 40 nt, from 2 to 30 nt, from 2 to 25 nt, from 2 to 20 nt, from 5 to 50 nt, from 5 to 40 nt, from 5 to 30 nt, from 5 to 25 nt, from 5 to 20 nt, from 10 to 50 nt, from 10 to 40 nt, from 10 to 30 nt, from 10 to 25 nt, from 10 to 20 nt, from 17 to 50 nt, from 17 to 40 nt, from 17 to 30 nt, from 17 to 25 nt). In some cases, the length of an insertion site of a subject nucleic acid has a length in a range of from 5 to 40 nt.

[0176] In some cases, a nucleic acid of the present disclosure (e.g., an expression vector) comprises: i) a nucleotide sequence encoding an RNA-guided effector polypeptide of the present disclosure; and ii) an insertion site for a nucleic acid comprising a nucleotide sequence encoding a heterologous fusion partner of interest. The insertion site can be located relative to the nucleotide sequence encoding the RNA-guided effector polypeptide, such that, after insertion of a nucleic acid comprising a nucleotide sequence encoding a heterologous fusion partner of interest, the resulting fusion polypeptide would comprise, in order from N-terminus to C-terminus: i) the RNA-guided effector polypeptide; and ii) the fusion partner. The insertion site can be located relative to the nucleotide sequence encoding the RNA-guided effector polypeptide, such that, after insertion of a nucleic acid comprising a nucleotide sequence encoding a heterologous fusion partner of interest, the resulting fusion polypeptide would comprise, in order from N-terminus to C-terminus: i) the fusion partner; and ii) the RNA-guided effector polypeptide. An insertion site is any nucleotide sequence used for the insertion of a desired sequence. “Insertion sites” for use with various technologies are known to those of ordinary skill in the art and any convenient insertion site can be used. An insertion site can be for any method for manipulating nucleic acid sequences. For example, in some cases the insertion site is a multiple cloning site (MCS) (e.g., a site including one or more restriction enzyme recognition sequences), a site for ligation independent cloning, a site for recombination based cloning (e.g., recombination based on att sites), a nucleotide sequence recognized by a CRISPR/Cas (e.g. Cas9) based technology, a Cre site, a FLP site, and the like.

### Guide RNA

[0177] A nucleic acid that binds to a Cas9 protein and targets the complex to a specific location within a target nucleic acid is referred to herein as a “Cas9 guide RNA” or, simply “a guide RNA.” A Cas9 guide RNA binds to an RNA-guided effector polypeptide of the present disclosure, forming an RNA-guided effector polypeptide/guide RNA complex, and targets the complex to a specific location (nucleotide sequence) within a target nucleic acid. A Cas9 guide RNA binds to a fusion polypeptide of the present disclosure, forming a fusion polypeptide/guide RNA complex, and targets the complex to a specific location (nucleotide sequence) within a target nucleic acid. A guide RNA that binds to a Cas9 polypeptide (e.g., a Spy Cas9 polypeptide as depicted in FIG. 1) also binds to an RNA-guided effector polypeptide of the present disclosure, and to a fusion polypeptide of the present disclosure.

[0178] A Cas9 guide RNA (can be said to include two segments, a first segment (referred to herein as a “targeting segment”); and a second segment (referred to herein as a “protein-binding segment”). By “segment” it is meant a segment/section/region of a molecule, e.g., a contiguous stretch of nucleotides in a nucleic acid molecule. A segment can also mean a region/section of a complex such that a segment may comprise regions of more than one molecule.

[0179] The first segment (targeting segment) of a Cas9 guide RNA includes a nucleotide sequence (a guide sequence) that is complementary to (and therefore hybridizes with) a specific sequence (a target site) within a target nucleic acid (e.g., a target ssRNA, a target ssDNA, the complementary strand of a double stranded target DNA, etc.). The protein-binding segment (or “protein-binding sequence”) interacts with (binds to) a Cas9 polypeptide, an RNA-guided effector polypeptide of the present disclosure, or a fusion polypeptide of the present disclosure. The protein-binding segment of a subject Cas9 guide RNA includes two complementary stretches of nucleotides that hybridize to one another to form a double stranded RNA duplex (dsRNA duplex). Site-specific binding and/or cleavage of a target nucleic acid (e.g., genomic DNA) can occur at locations (e.g., target sequence of a target locus) determined by base-pairing complementarity between the Cas9 guide RNA (the guide sequence of the Cas9 guide RNA) and the target nucleic acid.

[0180] A Cas9 guide RNA and a Cas9 protein (or an RNA-guided effector polypeptide of the present disclosure, or a fusion polypeptide of the present disclosure) form a complex (e.g., bind via non-covalent interactions). The Cas9 guide RNA provides target specificity to the complex by including a targeting segment, which includes a guide sequence (a nucleotide sequence that is complementary to a sequence of a target nucleic acid). The Cas9 protein (or an RNA-guided effector polypeptide of the present disclosure, or a fusion polypeptide of the present disclosure) of the complex provides the site-specific activity (e.g., binding activity provided by an RNA-guided effector polypeptide; binding activity provided by the RNA-guided effector portion of a fusion polypeptide of the present disclosure; or an activity provided by the fusion partner of a fusion polypeptide of the present disclosure). In other words, the Cas9 protein (or an RNA-guided effector polypeptide of the present disclosure, or a fusion polypeptide of the present disclosure) is guided to a target nucleic acid sequence (e.g. a target sequence in a chromosomal nucleic acid, e.g., a chromosome; a target sequence in an extrachromosomal nucleic acid, e.g. an episomal nucleic acid, a minicircle, an ssRNA, an ssDNA, etc.; a target sequence in a mitochondrial nucleic acid; a target sequence in a chloroplast nucleic acid; a target sequence in a plasmid; a target sequence in a viral nucleic acid; etc.) by virtue of its association with the Cas9 guide RNA.

[0181] The “guide sequence” also referred to as the “targeting sequence” of a guide RNA can be modified so that the guide RNA can target a Cas9 protein (or an RNA-guided effector polypeptide of the present disclosure, or a fusion polypeptide of the present disclosure) to any desired sequence of any desired target nucleic acid, with the exception that the protospacer adjacent motif (PAM) sequence can be taken into account. Thus, for example, a guide RNA can have a targeting segment with a sequence (a guide sequence) that has complementarity with (e.g., can hybridize to) a sequence in a nucleic acid in a eukaryotic cell, e.g., a viral nucleic acid, a eukaryotic nucleic acid (e.g., a eukaryotic chromosome, chromosomal sequence, a eukaryotic RNA, etc.), and the like.

[0182] In some cases, a Cas9 guide RNA includes two separate nucleic acid molecules: an “activator” and a “targeter” and is referred to herein as a “dual Cas9 guide RNA”, a “double-molecule Cas9 guide RNA”, or a “two-molecule Cas9 guide RNA” a “dual guide RNA”, or a “dgRNA.” In some cases, the activator and targeter are covalently linked to one another (e.g., via intervening nucleotides) and the guide RNA is referred to as a “single guide RNA”, a “Cas9 single guide RNA”, a “single-molecule Cas9 guide RNA,” or a “one-molecule Cas9 guide RNA”, or simply “sgRNA.”

[0183] A guide RNA comprises a crRNA-like (“CRISPR RNA”/“targeter”/“crRNA”/“crRNA repeat”) molecule and a corresponding tracrRNA-like (“trans-acting CRISPR RNA”/“activator”/“tracrRNA”) molecule. A crRNA-like molecule (targeter) comprises both the targeting segment (single stranded) of the guide RNA and a stretch (“duplex-forming segment”) of nucleotides that forms one half of the dsRNA duplex of the protein-binding segment of the guide RNA. A corresponding tracrRNA-like molecule (activator/tracrRNA) comprises a stretch of nucleotides (duplex-forming segment) that forms the other half of the dsRNA duplex of the protein-binding segment of the guide nucleic acid. In other words, a stretch of nucleotides of a crRNA-like molecule are complementary to and hybridize with a stretch of nucleotides of a tracrRNA-like molecule to form the dsRNA duplex of the protein-binding domain of the Cas9 guide RNA. As such, each targeter molecule can be said to have a corresponding activator molecule (which has a region that hybridizes with the targeter). The targeter molecule additionally provides the targeting segment. Thus, a targeter and an activator molecule (as a corresponding pair) hybridize to form a Cas9 guide RNA. The exact sequence of a given crRNA or tracrRNA molecule is characteristic of the species in which the RNA molecules are found. A subject dual Cas9 guide RNA can include any corresponding activator and targeter pair.

[0184] The term “activator” or “activator RNA” is used herein to mean a tracrRNA-like molecule (tracrRNA: “trans-acting CRISPR RNA”) of a Cas9 dual guide RNA (and therefore of a Cas9 single guide RNA when the “activator” and the “targeter” are linked together by, e.g., intervening nucleotides). Thus, for example, a Cas9 guide RNA (dgRNA or sgRNA) comprises an activator sequence (e.g., a tracrRNA sequence). A tracr molecule (a tracrRNA) is a naturally existing molecule that hybridizes with a CRISPR RNA molecule (a crRNA) to form a Cas9 dual guide RNA. The term “activator” is used herein to encompass naturally existing tracrRNAs, but also to encompass tracrRNAs with modifications (e.g., truncations, sequence variations, base modifications, backbone modifications, linkage modifications, etc.) where the activator retains at least one function of a tracrRNA (e.g., contributes to the dsRNA duplex to which Cas9 protein (or an RNA-guided effector polypeptide of the present disclosure, or a fusion polypeptide of the present disclosure) binds). In some cases the activator provides one or more stem loops that can interact with Cas9 protein (or an RNA-guided effector polypeptide of the present disclosure, or a fusion polypeptide of the present disclosure). An activator can be referred to as having a tracr sequence (tracrRNA sequence) and in some cases is a tracrRNA, but the term “activator” is not limited to naturally existing tracrRNAs.

[0185] The term “targeter” or “targeter RNA” is used herein to refer to a crRNA-like molecule (crRNA: “CRISPR RNA”) of a Cas9 dual guide RNA (and therefore of a Cas9 single guide RNA when the “activator” and the “targeter” are linked together, e.g., by intervening nucleotides). Thus, for example, a Cas9 guide RNA (dgRNA or sgRNA) comprises a targeting segment (which includes nucleotides that hybridize with (are complementary to) a target nucleic acid, and a duplex-forming segment (e.g., a duplex forming segment of a crRNA, which can also be referred to as a crRNA repeat). Because the sequence of a targeting segment (the segment that hybridizes with a target sequence of a target nucleic acid) of a targeter is modified by a user to hybridize with a desired target nucleic acid, the sequence of a targeter will often be a non-naturally occurring sequence. However, the duplex-forming segment of a targeter (described in more detail below), which hybridizes with the duplex-forming segment of an activator, can include a naturally existing sequence (e.g., can include the sequence of a duplex-forming segment of a naturally existing crRNA, which can also be referred to as a crRNA repeat). Thus, the term targeter is used herein to distinguish from naturally occurring crRNAs, despite the fact that part of a targeter (e.g., the duplex-forming segment) often includes a naturally occurring sequence from a crRNA. However, the term “targeter” encompasses naturally occurring crRNAs.

[0186] A Cas9 guide RNA can also be said to include 3 parts: (i) a targeting sequence (a nucleotide sequence that hybridizes with a sequence of the target nucleic acid); (ii) an activator sequence (as described above)(in some cases, referred to as a tracr sequence); and (iii) a sequence that hybridizes to at least a portion of the activator sequence to form a double stranded duplex. A targeter has (i) and (iii); while an activator has (ii).

[0187] A Cas9 guide RNA (e.g. a dual guide RNA or a single guide RNA) can be comprised of any corresponding activator and targeter pair. In some cases, the duplex forming segments can be swapped between the activator and the targeter. In other words, in some cases, the targeter includes a sequence of nucleotides from a duplex forming segment of a tracrRNA (which sequence would normally be part of an activator) while the activator includes a sequence of nucleotides from a duplex forming segment of a crRNA (which sequence would normally be part of a targeter).

[0188] As noted above, a targeter comprises both the targeting segment (single stranded) of the Cas9 guide RNA and a stretch (“duplex-forming segment”) of nucleotides that forms one half of the dsRNA duplex of the protein-binding segment of the Cas9 guide RNA. A corresponding tracrRNA-like molecule (activator) comprises a stretch of nucleotides (a duplex-forming segment) that forms the other half of the dsRNA duplex of the protein-binding segment of the Cas9 guide RNA. In other words, a stretch of nucleotides of the targeter is complementary to and hybridizes with a stretch of nucleotides of the activator to form the dsRNA duplex of the protein-binding segment of a Cas9 guide RNA. As such, each targeter can be said to have a corresponding activator (which has a region that hybridizes with the targeter). The targeter molecule additionally provides the targeting segment. Thus, a targeter and an activator (as a corresponding pair) hybridize to form a Cas9 guide RNA. The particular sequence of a given naturally existing crRNA or tracrRNA molecule is characteristic of the species in which the RNA molecules are found. Examples of suitable activator and targeter are well known in the art.

### Targeting Segment of a Cas9 Guide RNA

[0189] The first segment of a subject guide nucleic acid includes a guide sequence (i.e., a targeting sequence)(a nucleotide sequence that is complementary to a sequence (a target site) in a target nucleic acid). In other words, the targeting segment of a subject guide nucleic acid can interact with a target nucleic acid (e.g., double stranded DNA (dsDNA)) in a sequence-specific manner via hybridization (i.e., base pairing). As such, the nucleotide sequence of the targeting segment may vary (depending on the target) and can determine the location within the target nucleic acid that the Cas9 guide RNA and the target nucleic acid will interact. The targeting segment of a Cas9 guide RNA can be modified (e.g., by genetic engineering)/designed to hybridize to any desired sequence (target site) within a target nucleic acid (e.g., a eukaryotic target nucleic acid such as genomic DNA).

[0190] The targeting segment can have a length of 7 or more nucleotides (nt) (e.g., 8 or more, 9 or more, 10 or more, 12 or more, 15 or more, 20 or more, 25 or more, 30 or more, or 40 or more nucleotides). In some cases, the targeting segment can have a length of from 7 to 100 nucleotides (nt) (e.g., from 7 to 80 nt, from 7 to 60 nt, from 7 to 40 nt, from 7 to 30 nt, from 7 to 25 nt, from 7 to 22 nt, from 7 to 20 nt, from 7 to 18 nt, from 8 to 80 nt, from 8 to 60 nt, from 8 to 40 nt, from 8 to 30 nt, from 8 to 25 nt, from 8 to 22 nt, from 8 to 20 nt, from 8 to 18 nt, from 10 to 100 nt, from 10 to 80 nt, from 10 to 60 nt, from 10 to 40 nt, from 10 to 30 nt, from 10 to 25 nt, from 10 to 22 nt, from 10 to 20 nt, from 10 to 18 nt, from 12 to 100 nt, from 12 to 80 nt, from 12 to 60 nt, from 12 to 40 nt, from 12 to 30 nt, from 12 to 25 nt, from 12 to 22 nt, from 12 to 20 nt, from 12 to 18 nt, from 14 to 100 nt, from 14 to 80 nt, from 14 to 60 nt, from 14 to 40 nt, from 14 to 30 nt, from 14 to 25 nt, from 14 to 22 nt, from 14 to 20 nt, from 14 to 18 nt, from 16 to 100 nt, from 16 to 80 nt, from 16 to 60 nt, from 16 to 40 nt, from 16 to 30 nt, from 16 to 25 nt, from 16 to 22 nt, from 16 to 20 nt, from 16 to 18 nt, from 18 to 100 nt, from 18 to 80 nt, from 18 to 60 nt, from 18 to 40 nt, from 18 to 30 nt, from 18 to 25 nt, from 18 to 22 nt, or from 18 to 20 nt).

[0191] The nucleotide sequence (the targeting sequence) of the targeting segment that is complementary to a nucleotide sequence (target site) of the target nucleic acid can have a length of 10 nt or more. For example, the targeting sequence of the targeting segment that is complementary to a target site of the target nucleic acid can have a length of 12 nt or more, 15 nt or more, 18 nt or more, 19 nt or more, or 20 nt or more. In some cases, the nucleotide sequence (the targeting sequence) of the targeting segment that is complementary to a nucleotide sequence (target site) of the target nucleic acid has a length of 12 nt or more. In some cases, the nucleotide sequence (the targeting sequence) of the targeting segment that is complementary to a nucleotide sequence (target site) of the target nucleic acid has a length of 18 nt or more.

[0192] For example, the targeting sequence of the targeting segment that is complementary to a target sequence of the target nucleic acid can have a length of from 10 to 100 nucleotides (nt) (e.g., from 10 to 90 nt, from 10 to 75 nt, from 10 to 60 nt, from 10 to 50 nt, from 10 to 35 nt, from 10 to 30 nt, from 10 to 25 nt, from 10 to 22 nt, from 10 to 20 nt, from 12 to 100 nt, from 12 to 90 nt, from 12 to 75 nt, from 12 to 60 nt, from 12 to 50 nt, from 12 to 35 nt, from 12 to 30 nt, from 12 to 25 nt, from 12 to 22 nt, from 12 to 20 nt, from 15 to 100 nt, from 15 to 90 nt, from 15 to 75 nt, from 15 to 60 nt, from 15 to 50 nt, from 15 to 35 nt, from 15 to 30 nt, from 15 to 25 nt, from 15 to 22 nt, from 15 to 20 nt, from 17 to 100 nt, from 17 to 90 nt, from 17 to 75 nt, from 17 to 60 nt, from 17 to 50 nt, from 17 to 35 nt, from 17 to 30 nt, from 17 to 25 nt, from 17 to 22 nt, from 17 to 20 nt, from 18 to 100 nt, from 18 to 90 nt, from 18 to 75 nt, from 18 to 60 nt, from 18 to 50 nt, from 18 to 35 nt, from 18 to 30 nt, from 18 to 25 nt, from 18 to 22 nt, or from 18 to 20 nt). In some cases, the targeting sequence of the targeting segment that is complementary to a target sequence of the target nucleic acid has a length of from 15 nt to 30 nt. In some cases, the targeting sequence of the targeting segment that is complementary to a target sequence of the target nucleic acid has a length of from 15 nt to 25 nt. In some cases, the targeting sequence of the targeting segment that is complementary to a target sequence of the target nucleic acid has a length of from 18 nt to 30 nt. In some cases, the targeting sequence of the targeting segment that is complementary to a target sequence of the target nucleic acid has a length of from 18 nt to 25 nt. In some cases, the targeting sequence of the targeting segment that is complementary to a target sequence of the target nucleic acid has a length of from 18 nt to 22 nt. In some cases, the targeting sequence of the targeting segment that is complementary to a target site of the target nucleic acid is 20 nucleotides in length. In some cases, the targeting sequence of the targeting segment that is complementary to a target site of the target nucleic acid is 19 nucleotides in length.

[0193] The percent complementarity between the targeting sequence (guide sequence) of the targeting segment and the target site of the target nucleic acid can be 60% or more (e.g., 65% or more, 70% or more, 75% or more, 80% or more, 85% or more, 90% or more, 95% or more, 97% or more, 98% or more, 99% or more, or 100%). In some cases, the percent complementarity between the targeting sequence of the targeting segment and the target site of the target nucleic acid is 100% over the seven contiguous 5′-most nucleotides of the target site of the target nucleic acid. In some cases, the percent complementarity between the targeting sequence of the targeting segment and the target site of the target nucleic acid is 60% or more over about 20 contiguous nucleotides. In some cases, the percent complementarity between the targeting sequence of the targeting segment and the target site of the target nucleic acid is 100% over the fourteen contiguous 5′-most nucleotides of the target site of the target nucleic acid and as low as 0% or more over the remainder. In such a case, the targeting sequence can be considered to be 14 nucleotides in length. In some cases, the percent complementarity between the targeting sequence of the targeting segment and the target site of the target nucleic acid is 100% over the seven contiguous 5′-most nucleotides of the target site of the target nucleic acid and as low as 0% or more over the remainder. In such a case, the targeting sequence can be considered to be 20 nucleotides in length.

[0194] In some cases, the percent complementarity between the targeting sequence of the targeting segment and the target site of the target nucleic acid is 100% over the 7 contiguous 5′-most nucleotides of the target site of the target nucleic acid (which can be complementary to the 3′-most nucleotides of the targeting sequence of the Cas9 guide RNA). In some cases, the percent complementarity between the targeting sequence of the targeting segment and the target site of the target nucleic acid is 100% over the 8 contiguous 5′-most nucleotides of the target site of the target nucleic acid (which can be complementary to the 3′-most nucleotides of the targeting sequence of the Cas9 guide RNA). In some cases, the percent complementarity between the targeting sequence of the targeting segment and the target site of the target nucleic acid is 100% over the 9 contiguous 5′-most nucleotides of the target site of the target nucleic acid (which can be complementary to the 3′-most nucleotides of the targeting sequence of the Cas9 guide RNA). In some cases, the percent complementarity between the targeting sequence of the targeting segment and the target site of the target nucleic acid is 100% over the 10 contiguous 5′-most nucleotides of the target site of the target nucleic acid (which can be complementary to the 3′-most nucleotides of the targeting sequence of the Cas9 guide RNA). In some cases, the percent complementarity between the targeting sequence of the targeting segment and the target site of the target nucleic acid is 100% over the 17 contiguous 5′-most nucleotides of the target site of the target nucleic acid (which can be complementary to the 3′-most nucleotides of the targeting sequence of the Cas9 guide RNA). In some cases, the percent complementarity between the targeting sequence of the targeting segment and the target site of the target nucleic acid is 100% over the 18 contiguous 5′-most nucleotides of the target site of the target nucleic acid (which can be complementary to the 3′-most nucleotides of the targeting sequence of the Cas9 guide RNA). In some cases, the percent complementarity between the targeting sequence of the targeting segment and the target site of the target nucleic acid is 60% or more (e.g., e.g., 65% or more, 70% or more, 75% or more, 80% or more, 85% or more, 90% or more, 95% or more, 97% or more, 98% or more, 99% or more, or 100%) over about 20 contiguous nucleotides.

[0195] In some cases, the percent complementarity between the targeting sequence of the targeting segment and the target site of the target nucleic acid is 100% over the 7 contiguous 5′-most nucleotides of the target site of the target nucleic acid and as low as 0% or more over the remainder. In such a case, the targeting sequence can be considered to be 7 nucleotides in length. In some cases, the percent complementarity between the targeting sequence of the targeting segment and the target site of the target nucleic acid is 100% over the 8 contiguous 5′-most nucleotides of the target site of the target nucleic acid and as low as 0% or more over the remainder. In such a case, the targeting sequence can be considered to be 8 nucleotides in length. In some cases, the percent complementarity between the targeting sequence of the targeting segment and the target site of the target nucleic acid is 100% over the 9 contiguous 5′-most nucleotides of the target site of the target nucleic acid and as low as 0% or more over the remainder. In such a case, the targeting sequence can be considered to be 9 nucleotides in length. In some cases, the percent complementarity between the targeting sequence of the targeting segment and the target site of the target nucleic acid is 100% over the 10 contiguous 5′-most nucleotides of the target site of the target nucleic acid and as low as 0% or more over the remainder. In such a case, the targeting sequence can be considered to be 10 nucleotides in length. In some cases, the percent complementarity between the targeting sequence of the targeting segment and the target site of the target nucleic acid is 100% over the 11 contiguous 5′-most nucleotides of the target site of the target nucleic acid and as low as 0% or more over the remainder. In such a case, the targeting sequence can be considered to be 11 nucleotides in length. In some cases, the percent complementarity between the targeting sequence of the targeting segment and the target site of the target nucleic acid is 100% over the 12 contiguous 5′-most nucleotides of the target site of the target nucleic acid and as low as 0% or more over the remainder. In such a case, the targeting sequence can be considered to be 12 nucleotides in length. In some cases, the percent complementarity between the targeting sequence of the targeting segment and the target site of the target nucleic acid is 100% over the 13 contiguous 5′-most nucleotides of the target site of the target nucleic acid and as low as 0% or more over the remainder. In such a case, the targeting sequence can be considered to be 13 nucleotides in length. In some cases, the percent complementarity between the targeting sequence of the targeting segment and the target site of the target nucleic acid is 100% over the 14 contiguous 5′-most nucleotides of the target site of the target nucleic acid and as low as 0% or more over the remainder. In such a case, the targeting sequence can be considered to be 14 nucleotides in length. In some cases, the percent complementarity between the targeting sequence of the targeting segment and the target site of the target nucleic acid is 100% over the 17 contiguous 5′-most nucleotides of the target site of the target nucleic acid and as low as 0% or more over the remainder. In such a case, the targeting sequence can be considered to be 17 nucleotides in length. In some cases, the percent complementarity between the targeting sequence of the targeting segment and the target site of the target nucleic acid is 100% over the 18 contiguous 5′-most nucleotides of the target site of the target nucleic acid and as low as 0% or more over the remainder. In such a case, the targeting sequence can be considered to be 18 nucleotides in length.

[0196] Examples of various Cas9 proteins and Cas9 guide RNAs (as well as information regarding requirements related to protospacer adjacent motif (PAM) sequences present in targeted nucleic acids) can be found in the art, for example, see Jinek et al., Science. 2012 Aug. 17; 337(6096):816-21; Chylinski et al., RNA Biol. 2013 May; 10(5):726-37; Ma et al., Biomed Res Int. 2013; 2013:270805; Hou et al., Proc Natl Acad Sci USA. 2013 Sep. 24; 110(39):15644-9; Jinek et al., Elife. 2013; 2:e00471; Pattanayak et al., Nat Biotechnol. 2013 September; 31(9):839-43; Qi et al., Cell. 2013 Feb. 28; 152(5):1173-83; Wang et al., Cell. 2013 May 9; 153(4):910-8; Auer et al., Genome Res. 2013 Oct. 31; Chen et al., Nucleic Acids Res. 2013 Nov. 1; 41(20):e19; Cheng et al., Cell Res. 2013 October; 23(10):1163-71; Cho et al., Genetics. 2013 November; 195(3):1177-80; DiCarlo et al., Nucleic Acids Res. 2013 April; 41(7):4336-43; Dickinson et al., Nat Methods. 2013 October; 10(10):1028-34; Ebina et al., Sci Rep. 2013; 3:2510; Fujii et al., Nucleic Acids Res. 2013 Nov. 1; 41(20):e187; Hu et al., Cell Res. 2013 November; 23(11):1322-5; Jiang et al., Nucleic Acids Res. 2013 Nov. 1; 41(20):e188; Larson et al., Nat Protoc. 2013 November; 8(11):2180-96; Mali et al., Nat Methods. 2013 October; 10(10):957-63; Nakayama et al., Genesis. 2013 December; 51(12):835-43; Ran et al., Nat Protoc. 2013 November; 8(11):2281-308; Ran et al., Cell. 2013 Sep. 12; 154(6):1380-9; Upadhyay et al., G3 (Bethesda). 2013 Dec. 9; 3(12):2233-8; Walsh et al., Proc Natl Acad Sci USA. 2013 Sep. 24; 110(39):15514-5; Xie et al., Mol Plant. 2013 Oct. 9; Yang et al., Cell. 2013 Sep. 12; 154(6):1370-9; Briner et al., Mol Cell. 2014 Oct. 23; 56(2):333-9; and U.S. patents and patent applications: U.S. Pat. Nos. 8,906,616; 8,895,308; 8,889,418; 8,889,356; 8,871,445; 8,865,406; 8,795,965; 8,771,945; 8,697,359; 20140068797; 20140170753; 20140179006; 20140179770; 20140186843; 20140186919; 20140186958; 20140189896; 20140227787; 20140234972; 20140242664; 20140242699; 20140242700; 20140242702; 20140248702; 20140256046; 20140273037; 20140273226; 20140273230; 20140273231; 20140273232; 20140273233; 20140273234; 20140273235; 20140287938; 20140295556; 20140295557; 20140298547; 20140304853; 20140309487; 20140310828; 20140310830; 20140315985; 20140335063; 20140335620; 20140342456; 20140342457; 20140342458; 20140349400; 20140349405; 20140356867; 20140356956; 20140356958; 20140356959; 20140357523; 20140357530; 20140364333; and 20140377868; all of which are hereby incorporated by reference in their entirety.

### Nucleic Acid Modifications

[0197] In some embodiments, a nucleic acid of the present disclosure (e.g., a guide RNA; e.g., a guide RNA present in a system of the present disclosure, a composition of the present disclosure, or a kit of the present disclosure) has one or more modifications, e.g., a base modification, a backbone modification, etc., to provide the nucleic acid with a new or enhanced feature (e.g., improved stability). A nucleoside is a base-sugar combination. The base portion of the nucleoside is normally a heterocyclic base. The two most common classes of such heterocyclic bases are the purines and the pyrimidines. Nucleotides are nucleosides that further include a phosphate group covalently linked to the sugar portion of the nucleoside. For those nucleosides that include a pentofuranosyl sugar, the phosphate group can be linked to the 2′, the 3′, or the 5′ hydroxyl moiety of the sugar. In forming oligonucleotides, the phosphate groups covalently link adjacent nucleosides to one another to form a linear polymeric compound. In turn, the respective ends of this linear polymeric compound can be further joined to form a circular compound; however, linear compounds are suitable. In addition, linear compounds may have internal nucleotide base complementarity and may therefore fold in a manner as to produce a fully or partially double-stranded compound. Within oligonucleotides, the phosphate groups are commonly referred to as forming the internucleoside backbone of the oligonucleotide. The normal linkage or backbone of RNA and DNA is a 3′ to 5′ phosphodiester linkage.

[0198] Suitable nucleic acid modifications include, but are not limited to: 2′Omethyl modified nucleotides, 2′ Fluoro modified nucleotides, locked nucleic acid (LNA) modified nucleotides, peptide nucleic acid (PNA) modified nucleotides, nucleotides with phosphorothioate linkages, and a 5′ cap (e.g., a 7-methylguanylate cap (m7G)). Additional details and additional modifications are described below.

[0199] A 2′-O-Methyl modified nucleotide (also referred to as 2′-O-Methyl RNA) is a naturally occurring modification of RNA found in tRNA and other small RNAs that arises as a post-transcriptional modification. Oligonucleotides can be directly synthesized that contain 2′-O-Methyl RNA. This modification increases Tm of RNA:RNA duplexes but results in only small changes in RNA:DNA stability. It is stabile with respect to attack by single-stranded ribonucleases and is typically 5 to 10-fold less susceptible to DNases than DNA. It is commonly used in antisense oligos as a means to increase stability and binding affinity to the target message.

[0200] 2′ Fluoro modified nucleotides (e.g., 2′ Fluoro bases) have a fluorine modified ribose which increases binding affinity (Tm) and also confers some relative nuclease resistance when compared to native RNA. These modifications are commonly employed in ribozymes and siRNAs to improve stability in serum or other biological fluids.

[0201] LNA bases have a modification to the ribose backbone that locks the base in the C3′-endo position, which favors RNA A-type helix duplex geometry. This modification significantly increases Tm and is also very nuclease resistant. Multiple LNA insertions can be placed in an oligo at any position except the 3′-end. Applications have been described ranging from antisense oligos to hybridization probes to SNP detection and allele specific PCR. Due to the large increase in Tm conferred by LNAs, they also can cause an increase in primer dimer formation as well as self-hairpin formation. In some cases, the number of LNAs incorporated into a single oligo is 10 bases or less.

[0202] The phosphorothioate (PS) bond (i.e., a phosphorothioate linkage) substitutes a sulfur atom for a non-bridging oxygen in the phosphate backbone of a nucleic acid (e.g., an oligo). This modification renders the internucleotide linkage resistant to nuclease degradation. Phosphorothioate bonds can be introduced between the last 3-5 nucleotides at the 5′- or 3′-end of the oligo to inhibit exonuclease degradation. Including phosphorothioate bonds within the oligo (e.g., throughout the entire oligo) can help reduce attack by endonucleases as well.

[0203] In some embodiments, a guide RNA has one or more nucleotides that are 2′-O-Methyl modified nucleotides. In some embodiments, a guide RNA has one or more 2′ Fluoro modified nucleotides. In some embodiments, a guide RNA has one or more LNA bases. In some embodiments, a guide RNA has one or more nucleotides that are linked by a phosphorothioate bond (i.e., a guide RNA has one or more phosphorothioate linkages). In some embodiments, a guide RNA has a 5′ cap (e.g., a 7-methylguanylate cap (m7G)). In some embodiments, a guide RNA has a combination of modified nucleotides. For example, a guide RNA can have a 5′ cap (e.g., a 7-methylguanylate cap (m7G)) in addition to having one or more nucleotides with other modifications (e.g., a 2′-O-Methyl nucleotide and/or a 2′ Fluoro modified nucleotide and/or a LNA base and/or a phosphorothioate linkage).

### Modified Backbones and Modified Internucleoside Linkages

[0204] Examples of a guide RNAs containing modifications include a guide RNAs containing modified backbones or non-natural internucleoside linkages. Guide RNAs having modified backbones include those that retain a phosphorus atom in the backbone and those that do not have a phosphorus atom in the backbone.

[0205] Suitable modified oligonucleotide backbones containing a phosphorus atom therein include, for example, phosphorothioates, chiral phosphorothioates, phosphorodithioates, phosphotriesters, aminoalkylphosphotriesters, methyl and other alkyl phosphonates including 3′-alkylene phosphonates, 5′-alkylene phosphonates and chiral phosphonates, phosphinates, phosphoramidates including 3′-amino phosphoramidate and aminoalkylphosphoramidates, phosphorodiamidates, thionophosphoramidates, thionoalkylphosphonates, thionoalkylphosphotriesters, selenophosphates and boranophosphates having normal 3′-5′ linkages, 2′-5′ linked analogs of these, and those having inverted polarity wherein one or more internucleotide linkages is a 3′ to 3′, 5′ to 5′ or 2′ to 2′ linkage. Suitable oligonucleotides having inverted polarity comprise a single 3′ to 3′ linkage at the 3′-most internucleotide linkage i.e. a single inverted nucleoside residue which may be a basic (the nucleobase is missing or has a hydroxyl group in place thereof). Various salts (such as, for example, potassium or sodium), mixed salts and free acid forms are also included.

[0206] In some embodiments, a subject nucleic acid (e.g., a guide RNA) comprises one or more phosphorothioate and/or heteroatom internucleoside linkages, in particular —CH₂—NH—O—CH₂—, —CH₂—N(CH₃)—O—CH₂— (known as a methylene (methylimino) or MMI backbone), —CH₂—O—N(CH₃)—CH₂—, —CH₂—N(CH₃)—N(CH₃)—CH₂— and —O—N(CH₃)—CH₂—CH₂— (wherein the native phosphodiester internucleotide linkage is represented as —O—P(═O)(OH)—O—CH₂—). MMI type internucleoside linkages are disclosed in the above referenced U.S. Pat. No. 5,489,677, the disclosure of which is incorporated herein by reference in its entirety. Suitable amide internucleoside linkages are disclosed in U.S. Pat. No. 5,602,240, the disclosure of which is incorporated herein by reference in its entirety.

[0207] Also suitable are nucleic acids (e.g., a guide RNA) having morpholino backbone structures as described in, e.g., U.S. Pat. No. 5,034,506. For example, in some embodiments, a subject nucleic acid comprises a 6-membered morpholino ring in place of a ribose ring. In some of these embodiments, a phosphorodiamidate or other non-phosphodiester internucleoside linkage replaces a phosphodiester linkage.

[0208] Suitable modified polynucleotide backbones that do not include a phosphorus atom therein have backbones that are formed by short chain alkyl or cycloalkyl internucleoside linkages, mixed heteroatom and alkyl or cycloalkyl internucleoside linkages, or one or more short chain heteroatomic or heterocyclic internucleoside linkages. These include those having morpholino linkages (formed in part from the sugar portion of a nucleoside); siloxane backbones; sulfide, sulfoxide and sulfone backbones; formacetyl and thioformacetyl backbones; methylene formacetyl and thioformacetyl backbones; riboacetyl backbones; alkene containing backbones; sulfamate backbones; methyleneimino and methylenehydrazino backbones; sulfonate and sulfonamide backbones; amide backbones; and others having mixed N, O, S and CH₂ component parts.

### Mimetics

[0209] A subject nucleic acid (e.g., a guide RNA) can be a nucleic acid mimetic. The term “mimetic” as it is applied to polynucleotides is intended to include polynucleotides wherein only the furanose ring or both the furanose ring and the internucleotide linkage are replaced with non-furanose groups, replacement of only the furanose ring is also referred to in the art as being a sugar surrogate. The heterocyclic base moiety or a modified heterocyclic base moiety is maintained for hybridization with an appropriate target nucleic acid. One such nucleic acid, a polynucleotide mimetic that has been shown to have excellent hybridization properties, is referred to as a peptide nucleic acid (PNA). In PNA, the sugar-backbone of a polynucleotide is replaced with an amide containing backbone, in particular an aminoethylglycine backbone. The nucleotides are retained and are bound directly or indirectly to aza nitrogen atoms of the amide portion of the backbone.

[0210] One polynucleotide mimetic that has been reported to have excellent hybridization properties is a peptide nucleic acid (PNA). The backbone in PNA compounds is two or more linked aminoethylglycine units which gives PNA an amide containing backbone. The heterocyclic base moieties are bound directly or indirectly to aza nitrogen atoms of the amide portion of the backbone. Representative U.S. patents that describe the preparation of PNA compounds include, but are not limited to: U.S. Pat. Nos. 5,539,082; 5,714,331; and 5,719,262, the disclosures of which are incorporated herein by reference in their entirety.

[0211] Another class of polynucleotide mimetic that has been studied is based on linked morpholino units (morpholino nucleic acid) having heterocyclic bases attached to the morpholino ring. A number of linking groups have been reported that link the morpholino monomeric units in a morpholino nucleic acid. One class of linking groups has been selected to give a non-ionic oligomeric compound. The non-ionic morpholino-based oligomeric compounds are less likely to have undesired interactions with cellular proteins. Morpholino-based polynucleotides are non-ionic mimics of oligonucleotides which are less likely to form undesired interactions with cellular proteins (Dwaine A. Braasch and David R. Corey, Biochemistry, 2002, 41(14), 4503-4510). Morpholino-based polynucleotides are disclosed in U.S. Pat. No. 5,034,506, the disclosure of which is incorporated herein by reference in its entirety. A variety of compounds within the morpholino class of polynucleotides have been prepared, having a variety of different linking groups joining the monomeric subunits.

[0212] A further class of polynucleotide mimetic is referred to as cyclohexenyl nucleic acids (CeNA). The furanose ring normally present in a DNA/RNA molecule is replaced with a cyclohexenyl ring. CeNA DMT protected phosphoramidite monomers have been prepared and used for oligomeric compound synthesis following classical phosphoramidite chemistry. Fully modified CeNA oligomeric compounds and oligonucleotides having specific positions modified with CeNA have been prepared and studied (see Wang et al., J. Am. Chem. Soc., 2000, 122, 8595-8602, the disclosure of which is incorporated herein by reference in its entirety). In general the incorporation of CeNA monomers into a DNA chain increases its stability of a DNA/RNA hybrid. CeNA oligoadenylates formed complexes with RNA and DNA complements with similar stability to the native complexes. The study of incorporating CeNA structures into natural nucleic acid structures was shown by NMR and circular dichroism to proceed with easy conformational adaptation.

[0213] A further modification includes Locked Nucleic Acids (LNAs) in which the 2′-hydroxyl group is linked to the 4′ carbon atom of the sugar ring thereby forming a 2′-C,4′-C-oxymethylene linkage thereby forming a bicyclic sugar moiety. The linkage can be a methylene (—CH₂—), group bridging the 2′ oxygen atom and the 4′ carbon atom wherein n is 1 or 2 (Singh et al., Chem. Commun., 1998, 4, 455-456, the disclosure of which is incorporated herein by reference in its entirety). LNA and LNA analogs display very high duplex thermal stabilities with complementary DNA and RNA (Tm=+3 to +10° C.), stability towards 3′-exonucleolytic degradation and good solubility properties. Potent and nontoxic antisense oligonucleotides containing LNAs have been described (e.g., Wahlestedt et al., Proc. Natl. Acad. Sci. U.S.A., 2000, 97, 5633-5638, the disclosure of which is incorporated herein by reference in its entirety).

[0214] The synthesis and preparation of the LNA monomers adenine, cytosine, guanine, 5-methyl-cytosine, thymine and uracil, along with their oligomerization, and nucleic acid recognition properties have been described (e.g., Koshkin et al., Tetrahedron, 1998, 54, 3607-3630, the disclosure of which is incorporated herein by reference in its entirety). LNAs and preparation thereof are also described in WO 98/39352 and WO 99/14226, as well as U.S. applications 20120165514, 20100216983, 20090041809, 20060117410, 20040014959, 20020094555, and 20020086998, the disclosures of which are incorporated herein by reference in their entirety.

### Modified Sugar Moieties

[0215] A subject nucleic acid (e.g., a guide RNA) can also include one or more substituted sugar moieties. Suitable polynucleotides comprise a sugar substituent group selected from: OH; F; O-, S-, or N-alkyl; O-, S-, or N-alkenyl; O-, S- or N-alkynyl; or O-alkyl-O-alkyl, wherein the alkyl, alkenyl and alkynyl may be substituted or unsubstituted C₁ to C₁₀ alkyl or C₂ to C₁₀ alkenyl and alkynyl. Particularly suitable are O((CH₂)ₙO)ₘCH₃, O(CH₂)ₙOCH₃, O(CH₂)ₙNH₂, O(CH₂)ₙCH₃, O(CH₂)ₙONH₂, and O(CH₂)ₙON((CH₂)ₙCH₃)₂, where n and m are from 1 to about 10. Other suitable polynucleotides comprise a sugar substituent group selected from: C₁ to C₁₀ lower alkyl, substituted lower alkyl, alkenyl, alkynyl, alkaryl, aralkyl, O-alkaryl or O-aralkyl, SH, SCH₃, OCN, Cl, Br, CN, CF₃, OCF₃, SOCH₃, SO₂CH₃, ONO₂, NO₂, N₃, NH₂, heterocycloalkyl, heterocycloalkaryl, aminoalkylamino, polyalkylamino, substituted silyl, an RNA cleaving group, a reporter group, an intercalator, a group for improving the pharmacokinetic properties of an oligonucleotide, or a group for improving the pharmacodynamic properties of an oligonucleotide, and other substituents having similar properties. A suitable modification includes 2′-methoxyethoxy (2′-O—CH₂CH₂OCH₃, also known as 2′-O-(2-methoxyethyl) or 2′-MOE) (Martin et al., Helv. Chim. Acta, 1995, 78, 486-504, the disclosure of which is incorporated herein by reference in its entirety) i.e., an alkoxyalkoxy group. A further suitable modification includes 2′-dimethylaminooxyethoxy, i.e., a O(CH₂)₂ON(CH₃)₂ group, also known as 2′-DMAOE, as described in examples hereinbelow, and 2′-dimethylaminoethoxyethoxy (also known in the art as 2′-O-dimethyl-amino-ethoxy-ethyl or 2′-DMAEOE), i.e., 2′-O—CH₂—O—CH₂—N(CH₃)₂.

[0216] Other suitable sugar substituent groups include methoxy (—O—CH₃), aminopropoxy CH₂CH₂CH₂NH₂), allyl (—CH₂—CH═CH₂), —O-allyl CH₂—CH═CH₂) and fluoro (F). 2′-sugar substituent groups may be in the arabino (up) position or ribo (down) position. A suitable 2′-arabino modification is 2′-F. Similar modifications may also be made at other positions on the oligomeric compound, particularly the 3′ position of the sugar on the 3′ terminal nucleoside or in 2′-5′ linked oligonucleotides and the 5′ position of 5′ terminal nucleotide. Oligomeric compounds may also have sugar mimetics such as cyclobutyl moieties in place of the pentofuranosyl sugar. Base modifications and substitutions

[0217] A subject nucleic acid (e.g., a guide RNA) may also include nucleobase (often referred to in the art simply as “base”) modifications or substitutions. As used herein, “unmodified” or “natural” nucleobases include the purine bases adenine (A) and guanine (G), and the pyrimidine bases thymine (T), cytosine (C) and uracil (U). Modified nucleobases include other synthetic and natural nucleobases such as 5-methylcytosine (5-me-C), 5-hydroxymethyl cytosine, xanthine, hypoxanthine, 2-aminoadenine, 6-methyl and other alkyl derivatives of adenine and guanine, 2-propyl and other alkyl derivatives of adenine and guanine, 2-thiouracil, 2-thiothymine and 2-thiocytosine, 5-halouracil and cytosine, 5-propynyl (—C═C—CH₃) uracil and cytosine and other alkynyl derivatives of pyrimidine bases, 6-azo uracil, cytosine and thymine, 5-uracil (pseudouracil), 4-thiouracil, 8-halo, 8-amino, 8-thiol, 8-thioalkyl, 8-hydroxyl and other 8-substituted adenines and guanines, 5-halo particularly 5-bromo, 5-trifluoromethyl and other 5-substituted uracils and cytosines, 7-methylguanine and 7-methyladenine, 2-F-adenine, 2-aminoadenine, 8-azaguanine and 8-azaadenine, 7-deazaguanine and 7-deazaadenine and 3-deazaguanine and 3-deazaadenine. Further modified nucleobases include tricyclic pyrimidines such as phenoxazine cytidine(1H-pyrimido(5,4-b)(1,4)benzoxazin-2(3H)-one), phenothiazine cytidine (1H-pyrimido(5,4-b)(1,4)benzothiazin-2(3H)-one), G-clamps such as a substituted phenoxazine cytidine (e.g. 9-(2-aminoethoxy)-H-pyrimido(5,4-(b) (1,4)benzoxazin-2(3H)-one), carbazole cytidine (2H-pyrimido(4,5-b)indol-2-one), pyridoindole cytidine (H-pyrido(3′,2′:4,5)pyrrolo(2,3-d)pyrimidin-2-one).

[0218] Heterocyclic base moieties may also include those in which the purine or pyrimidine base is replaced with other heterocycles, for example 7-deaza-adenine, 7-deazaguanosine, 2-aminopyridine and 2-pyridone. Further nucleobases include those disclosed in U.S. Pat. No. 3,687,808, those disclosed in The Concise Encyclopedia Of Polymer Science And Engineering, pages 858-859, Kroschwitz, J. I., ed. John Wiley & Sons, 1990, those disclosed by Englisch et al., Angewandte Chemie, International Edition, 1991, 30, 613, and those disclosed by Sanghvi, Y. S., Chapter 15, Antisense Research and Applications, pages 289-302, Crooke, S. T. and Lebleu, B., ed., CRC Press, 1993; the disclosures of which are incorporated herein by reference in their entirety. Certain of these nucleobases are useful for increasing the binding affinity of an oligomeric compound. These include 5-substituted pyrimidines, 6-azapyrimidines and N-2, N-6 and 0-6 substituted purines, including 2-aminopropyladenine, 5-propynyluracil and 5-propynylcytosine. 5-methylcytosine substitutions have been shown to increase nucleic acid duplex stability by 0.6-1.2° C. (Sanghvi et al., eds., Antisense Research and Applications, CRC Press, Boca Raton, 1993, pp. 276-278; the disclosure of which is incorporated herein by reference in its entirety) and are suitable base substitutions, e.g., when combined with 2′-O-methoxyethyl sugar modifications.

### Conjugates

[0219] Another possible modification of a subject nucleic acid involves chemically linking to the polynucleotide one or more moieties or conjugates which enhance the activity, cellular distribution or cellular uptake of the oligonucleotide. These moieties or conjugates can include conjugate groups covalently bound to functional groups such as primary or secondary hydroxyl groups. Conjugate groups include, but are not limited to, intercalators, reporter molecules, polyamines, polyamides, polyethylene glycols, polyethers, groups that enhance the pharmacodynamic properties of oligomers, and groups that enhance the pharmacokinetic properties of oligomers. Suitable conjugate groups include, but are not limited to, cholesterols, lipids, phospholipids, biotin, phenazine, folate, phenanthridine, anthraquinone, acridine, fluoresceins, rhodamines, coumarins, and dyes. Groups that enhance the pharmacodynamic properties include groups that improve uptake, enhance resistance to degradation, and/or strengthen sequence-specific hybridization with the target nucleic acid. Groups that enhance the pharmacokinetic properties include groups that improve uptake, distribution, metabolism or excretion of a subject nucleic acid.

[0220] Conjugate moieties include but are not limited to lipid moieties such as a cholesterol moiety (Letsinger et al., Proc. Natl. Acad. Sci. USA, 1989, 86, 6553-6556), cholic acid (Manoharan et al., Bioorg. Med. Chem. Let., 1994, 4, 1053-1060), a thioether, e.g., hexyl-S-tritylthiol (Manoharan et al., Ann. N.Y Acad. Sci., 1992, 660, 306-309; Manoharan et al., Bioorg. Med. Chem. Let., 1993, 3, 2765-2770), a thiocholesterol (Oberhauser et al., Nucl. Acids Res., 1992, 20, 533-538), an aliphatic chain, e.g., dodecandiol or undecyl residues (Saison-Behmoaras et al., EMBO J., 1991, 10, 1111-1118; Kabanov et al., FEBS Lett., 1990, 259, 327-330; Svinarchuk et al., Biochimie, 1993, 75, 49-54), a phospholipid, e.g., di-hexadecyl-rac-glycerol or triethylammonium 1,2-di-O-hexadecyl-rac-glycero-3-H-phosphonate (Manoharan et al., Tetrahedron Lett., 1995, 36, 3651-3654; Shea et al., Nucl. Acids Res., 1990, 18, 3777-3783), a polyamine or a polyethylene glycol chain (Manoharan et al., Nucleosides & Nucleotides, 1995, 14, 969-973), or adamantane acetic acid (Manoharan et al., Tetrahedron Lett., 1995, 36, 3651-3654), a palmityl moiety (Mishra et al., Biochim. Biophys. Acta, 1995, 1264, 229-237), or an octadecylamine or hexylamino-carbonyl-oxycholesterol moiety (Crooke et al., J. Pharmacol. Exp. Ther., 1996, 277, 923-937).

[0221] A conjugate may include a “Protein Transduction Domain” or PTD (also known as a CPP—cell penetrating peptide), which may refer to a polypeptide, polynucleotide, carbohydrate, or organic or inorganic compound that facilitates traversing a lipid bilayer, micelle, cell membrane, organelle membrane, or vesicle membrane. A PTD attached to another molecule, which can range from a small polar molecule to a large macromolecule and/or a nanoparticle, facilitates the molecule traversing a membrane, for example going from extracellular space to intracellular space, or cytosol to within an organelle (e.g., the nucleus). In some embodiments, a PTD is covalently linked to the 3′ end of an exogenous polynucleotide. In some embodiments, a PTD is covalently linked to the 5′ end of an exogenous polynucleotide. Exemplary PTDs include but are not limited to a minimal undecapeptide protein transduction domain (corresponding to residues 47-57 of HIV-1 TAT comprising YGRKKRRQRRR; SEQ ID NO:854); a polyarginine sequence comprising a number of arginines sufficient to direct entry into a cell (e.g., 3, 4, 5, 6, 7, 8, 9, 10, or 10-50 arginines); a VP22 domain (Zender et al. (2002) Cancer Gene Ther. 9(6):489-96); an Drosophila antennapedia protein transduction domain (Noguchi et al. (2003) Diabetes 52(7):1732-1737); a truncated human calcitonin peptide (Trehin et al. (2004) Pharm. Research 21:1248-1256); polylysine (Wender et al. (2000) Proc. Natl. Acad. Sci. USA 97:13003-13008); RRQRRTSKLMKR SEQ ID NO:855); Transportan GWTLNSAGYLLGKINLKALAALAKKIL SEQ ID NO:856); KALAWEAKLAKALAKALAKHLAKALAKALKCEA SEQ ID NO:857); and RQIKIWFQNRRMKWKK SEQ ID NO:853). Exemplary PTDs include but are not limited to, YGRKKRRQRRR SEQ ID NO:854), RKKRRQRRR SEQ ID NO:858); an arginine homopolymer of from 3 arginine residues to 50 arginine residues; Exemplary PTD domain amino acid sequences include, but are not limited to, any of the following: YGRKKRRQRRR SEQ ID NO:854); RKKRRQRR SEQ ID NO:859); YARAAARQARA SEQ ID NO:860); THRLPRRRRRR SEQ ID NO:861); and GGRRARRRRRR SEQ ID NO:862). In some embodiments, the PTD is an activatable CPP (ACPP) (Aguilera et al. (2009) Integr Biol (Camb) June; 1(5-6): 371-381). ACPPs comprise a polycationic CPP (e.g., Arg9 or “R9”) connected via a cleavable linker to a matching polyanion (e.g., Glu9 or “E9”), which reduces the net charge to nearly zero and thereby inhibits adhesion and uptake into cells. Upon cleavage of the linker, the polyanion is released, locally unmasking the polyarginine and its inherent adhesiveness, thus “activating” the ACPP to traverse the membrane.

Introducing Components into a Target Cell

[0222] A guide RNA (or a nucleic acid comprising a nucleotide sequence encoding same) and/or an RNA-guided effector polypeptide of the present disclosure (or a nucleic acid comprising a nucleotide sequence encoding same) and/or a fusion polypeptide of the present disclosure (or a nucleic acid that includes a nucleotide sequence encoding a fusion polypeptide of the present disclosure) and/or a donor polynucleotide (donor template) can be introduced into a host cell by any of a variety of well-known methods.

[0223] Any of a variety of compounds and methods can be used to deliver to a target cell a system of the present disclosure (e.g., where a system of the present disclosure comprises: a) a an RNA-guided effector polypeptide of the present disclosure and a guide RNA; b) a fusion polypeptide of the present disclosure and a guide RNA; c) a fusion polypeptide of the present disclosure, a guide RNA, and a donor template nucleic acid; d) an mRNA encoding an RNA-guided effector polypeptide of the present disclosure; and a guide RNA; e) an mRNA encoding a fusion polypeptide of the present disclosure; and a guide RNA; f) an mRNA encoding a fusion polypeptide of the present disclosure, a guide RNA, and a donor template nucleic acid; g) a recombinant expression vector comprising a nucleotide sequence encoding an RNA-guided effector polypeptide of the present disclosure and a nucleotide sequence encoding a guide RNA; h) a recombinant expression vector comprising a nucleotide sequence encoding a fusion polypeptide of the present disclosure and a nucleotide sequence encoding a guide RNA; i) a recombinant expression vector comprising a nucleotide sequence encoding a fusion polypeptide of the present disclosure, a nucleotide sequence encoding a guide RNA, and a nucleotide sequence encoding a donor template nucleic acid; j) a first recombinant expression vector comprising a nucleotide sequence encoding an RNA-guided effector polypeptide of the present disclosure, and a second recombinant expression vector comprising a nucleotide sequence encoding a guide RNA; k) a first recombinant expression vector comprising a nucleotide sequence encoding a fusion polypeptide of the present disclosure, and a second recombinant expression vector comprising a nucleotide sequence encoding a guide RNA; l) a first recombinant expression vector comprising a nucleotide sequence encoding a fusion polypeptide of the present disclosure, and a second recombinant expression vector comprising a nucleotide sequence encoding a guide RNA; and a donor template nucleic acid; m) a recombinant expression vector comprising a nucleotide sequence encoding an RNA-guided effector polypeptide of the present disclosure, a nucleotide sequence encoding a first guide RNA, and a nucleotide sequence encoding a second guide RNA; or n) a recombinant expression vector comprising a nucleotide sequence encoding a fusion polypeptide of the present disclosure, a nucleotide sequence encoding a first guide RNA, and a nucleotide sequence encoding a second guide RNA; or some variation of one of (a) through (n). As a non-limiting example, a system of the present disclosure can be combined with a lipid. As another non-limiting example, a system of the present disclosure can be combined with a particle, or formulated into a particle.

[0224] Methods of introducing a nucleic acid into a host cell are known in the art, and any convenient method can be used to introduce a subject nucleic acid (e.g., an expression construct/vector) into a target cell (e.g., prokaryotic cell, eukaryotic cell, plant cell, animal cell, mammalian cell, human cell, and the like). Suitable methods include, e.g., viral infection, transfection, conjugation, protoplast fusion, lipofection, electroporation, calcium phosphate precipitation, polyethyleneimine (PEI)-mediated transfection, DEAE-dextran mediated transfection, liposome-mediated transfection, particle gun technology, calcium phosphate precipitation, direct micro injection, nanoparticle-mediated nucleic acid delivery (see, e.g., Panyam et., al Adv Drug Deliv Rev. 2012 Sep. 13. pii: 50169-409X(12)00283-9. doi: 10.1016/j.addr.2012.09.023), and the like.

[0225] In some cases, an RNA-guided effector polypeptide of the present disclosure is provided as a nucleic acid (e.g., an mRNA, a DNA, a plasmid, an expression vector, a viral vector, etc.) that encodes the RNA-guided effector polypeptide. In some cases, the RNA-guided effector polypeptide of the present disclosure is provided directly as a protein (e.g., without an associated guide RNA or with an associate guide RNA, i.e., as a ribonucleoprotein complex). An RNA-guided effector polypeptide of the present disclosure can be introduced into a cell (provided to the cell) by any convenient method; such methods are known to those of ordinary skill in the art. As an illustrative example, an RNA-guided effector polypeptide of the present disclosure can be injected directly into a cell (e.g., with or without a guide RNA or nucleic acid encoding a guide RNA, and with or without a donor polynucleotide). As another example, a preformed complex of an RNA-guided effector polypeptide of the present disclosure and a guide RNA (an RNP) can be introduced into a cell (e.g., eukaryotic cell) (e.g., via injection, via nucleofection; via a protein transduction domain (PTD) conjugated to one or more components, e.g., conjugated to the RNA-guided effector polypeptide protein, conjugated to a guide RNA, conjugated to an RNA-guided effector polypeptide of the present disclosure and a guide RNA; etc.).

[0226] In some cases, a fusion polypeptide (an RNA-guided effector polypeptide fused to a heterologous fusion partner) of the present disclosure is provided as a nucleic acid (e.g., an mRNA, a DNA, a plasmid, an expression vector, a viral vector, etc.) that encodes the fusion polypeptide. In some cases, a fusion polypeptide of the present disclosure is provided directly as a protein (e.g., without an associated guide RNA or with an associate guide RNA, i.e., as a ribonucleoprotein complex). A fusion polypeptide of the present disclosure can be introduced into a cell (provided to the cell) by any convenient method; such methods are known to those of ordinary skill in the art. As an illustrative example, a fusion polypeptide of the present disclosure can be injected directly into a cell (e.g., with or without nucleic acid encoding a guide RNA and with or without a donor polynucleotide). As another example, a preformed complex of a fusion polypeptide of the present disclosure and a guide RNA (an RNP) can be introduced into a cell (e.g., via injection, via nucleofection; via a protein transduction domain (PTD) conjugated to one or more components, e.g., conjugated to the fusion protein, conjugated to a guide RNA, conjugated to a fusion polypeptide of the present disclosure and a guide RNA; etc.).

[0227] In some cases, a nucleic acid (e.g., a guide RNA; a nucleic acid comprising a nucleotide sequence encoding an RNA-guided effector polypeptide of the present disclosure; a nucleic acid comprising a nucleotide sequence encoding a fusion polypeptide of the present disclosure; etc.) is delivered to a cell (e.g., a target host cell) and/or a polypeptide (e.g., an RNA-guided effector polypeptide; a fusion polypeptide) in a particle, or associated with a particle. In some cases, a system of the present disclosure is delivered to a cell in a particle, or associated with a particle. The terms “particle” and “nanoparticle” can be used interchangeable, as appropriate. A recombinant expression vector comprising a nucleotide sequence encoding an RNA-guided effector polypeptide of the present disclosure or a fusion polypeptide of the present disclosure and/or a guide RNA, an mRNA comprising a nucleotide sequence encoding an RNA-guided effector polypeptide of the present disclosure or a fusion polypeptide of the present disclosure, and guide RNA may be delivered simultaneously using particles or lipid envelopes; for instance, an RNA-guided effector polypeptide of the present disclosure polypeptide and a guide RNA, or a fusion polypeptide of the present disclosure and a guide RNA, e.g., as a complex (e.g., a ribonucleoprotein (RNP) complex), can be delivered via a particle, e.g., a delivery particle comprising lipid or lipidoid and hydrophilic polymer, e.g., a cationic lipid and a hydrophilic polymer, for instance wherein the cationic lipid comprises 1,2-dioleoyl-3-trimethylammonium-propane (DOTAP) or 1,2-ditetradecanoyl-sn-glycero-3-phosphocholine (DMPC) and/or wherein the hydrophilic polymer comprises ethylene glycol or polyethylene glycol (PEG); and/or wherein the particle further comprises cholesterol (e.g., particle from formulation 1=DOTAP 100, DMPC 0, PEG 0, Cholesterol 0; formulation number 2=DOTAP 90, DMPC 0, PEG 10, Cholesterol 0; formulation number 3=DOTAP 90, DMPC 0, PEG 5, Cholesterol 5). For example, a particle can be formed using a multistep process in which an RNA-guided effector polypeptide of the present disclosure and a guide RNA, or a fusion polypeptide of the present disclosure and a guide RNA, are mixed together, e.g., at a 1:1 molar ratio, e.g., at room temperature, e.g., for 30 minutes, e.g., in sterile, nuclease free 1× phosphate-buffered saline (PBS); and separately, DOTAP, DMPC, PEG, and cholesterol as applicable for the formulation are dissolved in alcohol, e.g., 100% ethanol; and, the two solutions are mixed together to form particles containing the complexes).

[0228] A RNA-guided effector polypeptide of the present disclosure polypeptide (or an mRNA comprising a nucleotide sequence encoding an RNA-guided effector polypeptide of the present disclosure polypeptide; or a recombinant expression vector comprising a nucleotide sequence encoding an RNA-guided effector polypeptide of the present disclosure polypeptide) and/or guide RNA (or a nucleic acid such as one or more expression vectors encoding the guide RNA), or a fusion polypeptide of the present disclosure (or an mRNA comprising a nucleotide sequence encoding a fusion polypeptide of the present disclosure; or a recombinant expression vector comprising a nucleotide sequence encoding a fusion polypeptide of the present disclosure polypeptide) and/or a guide RNA may be delivered simultaneously using particles or lipid envelopes. For example, a biodegradable core-shell structured nanoparticle with a poly (β-amino ester) (PBAE) core enveloped by a phospholipid bilayer shell can be used. In some cases, particles/nanoparticles based on self assembling bioadhesive polymers are used; such particles/nanoparticles may be applied to oral delivery of peptides, intravenous delivery of peptides and nasal delivery of peptides, e.g., to the brain. Other embodiments, such as oral absorption and ocular delivery of hydrophobic drugs are also contemplated. A molecular envelope technology, which involves an engineered polymer envelope which is protected and delivered to the site of the disease, can be used. Doses of about 5 mg/kg can be used, with single or multiple doses, depending on various factors, e.g., the target tissue.

[0229] Lipidoid compounds (e.g., as described in US patent application 20110293703) are also useful in the administration of polynucleotides, and can be used to deliver an RNA-guided effector polypeptide of the present disclosure, a fusion polypeptide of the present disclosure, an RNP of the present disclosure, a nucleic acid of the present disclosure, or a system of the present disclosure (e.g., where a system of the present disclosure comprises: a) a an RNA-guided effector polypeptide of the present disclosure and a guide RNA; b) a fusion polypeptide of the present disclosure and a guide RNA; c) a fusion polypeptide of the present disclosure, a guide RNA, and a donor template nucleic acid; d) an mRNA encoding an RNA-guided effector polypeptide of the present disclosure; and a guide RNA; e) an mRNA encoding a fusion polypeptide of the present disclosure; and a guide RNA; f) an mRNA encoding a fusion polypeptide of the present disclosure, a guide RNA, and a donor template nucleic acid; g) a recombinant expression vector comprising a nucleotide sequence encoding an RNA-guided effector polypeptide of the present disclosure and a nucleotide sequence encoding a guide RNA; h) a recombinant expression vector comprising a nucleotide sequence encoding a fusion polypeptide of the present disclosure and a nucleotide sequence encoding a guide RNA; i) a recombinant expression vector comprising a nucleotide sequence encoding a fusion polypeptide of the present disclosure, a nucleotide sequence encoding a guide RNA, and a nucleotide sequence encoding a donor template nucleic acid; j) a first recombinant expression vector comprising a nucleotide sequence encoding an RNA-guided effector polypeptide of the present disclosure, and a second recombinant expression vector comprising a nucleotide sequence encoding a guide RNA; k) a first recombinant expression vector comprising a nucleotide sequence encoding a fusion polypeptide of the present disclosure, and a second recombinant expression vector comprising a nucleotide sequence encoding a guide RNA; l) a first recombinant expression vector comprising a nucleotide sequence encoding a fusion polypeptide of the present disclosure, and a second recombinant expression vector comprising a nucleotide sequence encoding a guide RNA; and a donor template nucleic acid; m) a recombinant expression vector comprising a nucleotide sequence encoding an RNA-guided effector polypeptide of the present disclosure, a nucleotide sequence encoding a first guide RNA, and a nucleotide sequence encoding a second guide RNA; or n) a recombinant expression vector comprising a nucleotide sequence encoding a fusion polypeptide of the present disclosure, a nucleotide sequence encoding a first guide RNA, and a nucleotide sequence encoding a second guide RNA; or some variation of one of (a) through (n). In one aspect, the aminoalcohol lipidoid compounds are combined with an agent to be delivered to a cell or a subject to form microparticles, nanoparticles, liposomes, or micelles. The aminoalcohol lipidoid compounds may be combined with other aminoalcohol lipidoid compounds, polymers (synthetic or natural), surfactants, cholesterol, carbohydrates, proteins, lipids, etc. to form the particles. These particles may then optionally be combined with a pharmaceutical excipient to form a pharmaceutical composition.

[0230] A poly(beta-amino alcohol) (PBAA) can be used to deliver an RNA-guided effector polypeptide of the present disclosure, a fusion polypeptide of the present disclosure, an RNP of the present disclosure, a nucleic acid of the present disclosure, or a system of the present disclosure, to a target cell. US Patent Publication No. 20130302401 relates to a class of poly(beta-amino alcohols) (PBAAs) that has been prepared using combinatorial polymerization.

[0231] Sugar-based particles may be used, for example GalNAc, as described with reference to WO2014118272 (incorporated herein by reference) and Nair, J K et al., 2014, Journal of the American Chemical Society 136 (49), 16958-16961) can be used to deliver an RNA-guided effector polypeptide of the present disclosure, a fusion polypeptide of the present disclosure, an RNP of the present disclosure, a nucleic acid of the present disclosure, or a system of the present disclosure, to a target cell.

[0232] In some cases, lipid nanoparticles (LNPs) are used to deliver an RNA-guided effector polypeptide of the present disclosure, a fusion polypeptide of the present disclosure, an RNP of the present disclosure, a nucleic acid of the present disclosure, or a system of the present disclosure, to a target cell. Negatively charged polymers such as RNA may be loaded into LNPs at low pH values (e.g., pH 4) where the ionizable lipids display a positive charge. However, at physiological pH values, the LNPs exhibit a low surface charge compatible with longer circulation times. Four species of ionizable cationic lipids have been focused upon, namely 1,2-dilineoyl-3-dimethylammonium-propane (DLinDAP), 1,2-dilinoleyloxy-3-N,N-dimethylaminopropane (DLinDMA), 1,2-dilinoleyloxy-keto-N,N-dimethyl-3-aminopropane (DLinKDMA), and 1,2-dilinoleyl-4-(2-dimethylaminoethyl)[1,3]-dioxolane (DLinKC2-DMA). Preparation of LNPs and is described in, e.g., Rosin et al. (2011) Molecular Therapy 19:1286-2200). The cationic lipids 1,2-dilineoyl-3-dimethylammonium-propane (DLinDAP), 1,2-dilinoleyloxy-3-N,N-dimethylaminopropane (DLinDMA), 1,2-dilinoleyloxyketo-N,N-dimethyl-3-aminopropane (DLinK-DMA), 1,2-dilinoleyl-4-(2-dimethylaminoethyl)[1,3]-dioxolane (DLinKC2-DMA), (3-o-[2″-(methoxypolyethyleneglycol 2000) succinoyl]-1,2-dimyristoyl-sn-glycol (PEG-S-DMG), and R-3-[(omega-methoxy-poly(ethylene glycol)2000) carbamoyl]-1,2-dimyristyloxlpropyl-3-amine (PEG-C-DOMG) may be used. A nucleic acid (e.g., a guide RNA; a nucleic acid of the present disclosure; etc.) may be encapsulated in LNPs containing DLinDAP, DLinDMA, DLinK-DMA, and DLinKC2-DMA (cationic lipid:DSPC:CHOL:PEGS-DMG or PEG-C-DOMG at 40:10:40:10 molar ratios). In some cases, 0.2% SP-DiOC18 is incorporated.

[0233] Spherical Nucleic Acid (SNA™) constructs and other nanoparticles (particularly gold nanoparticles) can be used to deliver an RNA-guided effector polypeptide of the present disclosure, a fusion polypeptide of the present disclosure, an RNP of the present disclosure, a nucleic acid of the present disclosure, or a system of the present disclosure, to a target cell. See, e.g., Cutler et al., J. Am. Chem. Soc. 2011 133:9254-9257, Hao et al., Small. 2011 7:3158-3162, Zhang et al., ACS Nano. 2011 5:6962-6970, Cutler et al., J. Am. Chem. Soc. 2012 134:1376-1391, Young et al., Nano Lett. 2012 12:3867-71, Zheng et al., Proc. Natl. Acad. Sci. USA. 2012 109:11975-80, Mirkin, Nanomedicine 2012 7:635-638 Zhang et al., J. Am. Chem. Soc. 2012 134:16488-1691, Weintraub, Nature 2013 495:S14-S16, Choi et al., Proc. Natl. Acad. Sci. USA. 2013 110(19): 7625-7630, Jensen et al., Sci. Transl. Med. 5, 209ra152 (2013) and Mirkin, et al., Small, 10:186-192.

[0234] Self-assembling nanoparticles with RNA may be constructed with polyethyleneimine (PEI) that is PEGylated with an Arg-Gly-Asp (RGD) peptide ligand attached at the distal end of the polyethylene glycol (PEG).

[0235] In general, a “nanoparticle” refers to any particle having a diameter of less than 1000 nm. In some cases, nanoparticles suitable for use in delivering an RNA-guided effector polypeptide of the present disclosure, a fusion polypeptide of the present disclosure, an RNP of the present disclosure, a nucleic acid of the present disclosure, or a system of the present disclosure, to a target cell have a diameter of 500 nm or less, e.g., from 25 nm to 35 nm, from 35 nm to 50 nm, from 50 nm to 75 nm, from 75 nm to 100 nm, from 100 nm to 150 nm, from 150 nm to 200 nm, from 200 nm to 300 nm, from 300 nm to 400 nm, or from 400 nm to 500 nm. In some cases, nanoparticles suitable for use in delivering an RNA-guided effector polypeptide of the present disclosure, a fusion polypeptide of the present disclosure, an RNP of the present disclosure, a nucleic acid of the present disclosure, or a system of the present disclosure, to a target cell have a diameter of from 25 nm to 200 nm. In some cases, nanoparticles suitable for use in delivering an RNA-guided effector polypeptide of the present disclosure, a fusion polypeptide of the present disclosure, an RNP of the present disclosure, a nucleic acid of the present disclosure, or a system of the present disclosure, to a target cell have a diameter of 100 nm or less In some cases, nanoparticles suitable for use in delivering an RNA-guided effector polypeptide of the present disclosure, a fusion polypeptide of the present disclosure, an RNP of the present disclosure, a nucleic acid of the present disclosure, or a system of the present disclosure, to a target cell have a diameter of from 35 nm to 60 nm.

[0236] Nanoparticles suitable for use in delivering an RNA-guided effector polypeptide of the present disclosure, a fusion polypeptide of the present disclosure, an RNP of the present disclosure, a nucleic acid of the present disclosure, or a system of the present disclosure, to a target cell may be provided in different forms, e.g., as solid nanoparticles (e.g., metal such as silver, gold, iron, titanium), non-metal, lipid-based solids, polymers), suspensions of nanoparticles, or combinations thereof. Metal, dielectric, and semiconductor nanoparticles may be prepared, as well as hybrid structures (e.g., core-shell nanoparticles). Nanoparticles made of semiconducting material may also be labeled quantum dots if they are small enough (typically below 10 nm) that quantization of electronic energy levels occurs. Such nanoscale particles are used in biomedical applications as drug carriers or imaging agents and may be adapted for similar purposes in the present disclosure.

[0237] Semi-solid and soft nanoparticles are also suitable for use in delivering polypeptide of the present disclosure, a fusion polypeptide of the present disclosure, an RNP of the present disclosure, a nucleic acid of the present disclosure, or a system of the present disclosure, to a target cell. A prototype nanoparticle of semi-solid nature is the liposome.

[0238] In some cases, an exosome is used to deliver an RNA-guided effector polypeptide of the present disclosure, a fusion polypeptide of the present disclosure, an RNP of the present disclosure, a nucleic acid of the present disclosure, or a system of the present disclosure, to a target cell. Exosomes are endogenous nano-vesicles that transport RNAs and proteins, and which can deliver RNA to the brain and other target organs.

[0239] In some cases, a liposome is used to deliver an RNA-guided effector polypeptide of the present disclosure, a fusion polypeptide of the present disclosure, an RNP of the present disclosure, a nucleic acid of the present disclosure, or a system of the present disclosure, to a target cell. Liposomes are spherical vesicle structures composed of a uni- or multilamellar lipid bilayer surrounding internal aqueous compartments and a relatively impermeable outer lipophilic phospholipid bilayer. Liposomes can be made from several different types of lipids; however, phospholipids are most commonly used to generate liposomes. Although liposome formation is spontaneous when a lipid film is mixed with an aqueous solution, it can also be expedited by applying force in the form of shaking by using a homogenizer, sonicator, or an extrusion apparatus. Several other additives may be added to liposomes in order to modify their structure and properties. For instance, either cholesterol or sphingomyelin may be added to the liposomal mixture in order to help stabilize the liposomal structure and to prevent the leakage of the liposomal inner cargo. A liposome formulation may be mainly comprised of natural phospholipids and lipids such as 1,2-distearoryl-sn-glycero-3-phosphatidyl choline (DSPC), sphingomyelin, egg phosphatidylcholines and monosialoganglioside.

[0240] A stable nucleic-acid-lipid particle (SNALP) can be used to deliver an RNA-guided effector polypeptide of the present disclosure, a fusion polypeptide of the present disclosure, an RNP of the present disclosure, a nucleic acid of the present disclosure, or a system of the present disclosure, to a target cell. The SNALP formulation may contain the lipids 3-N-Rmethoxypoly(ethylene glycol) 2000) carbamoyl]-1,2-dimyristyloxy-propylamine (PEG-C-DMA), 1,2-dilinoleyloxy-N,N-dimethyl-3-aminopropane (DLinDMA), 1,2-distearoyl-sn-glycero-3-phosphocholine (DSPC) and cholesterol, in a 2:40:10:48 molar percent ratio. The SNALP liposomes may be prepared by formulating D-Lin-DMA and PEG-C-DMA with distearoylphosphatidylcholine (DSPC), Cholesterol and siRNA using a 25:1 lipid/siRNA ratio and a 48/40/10/2 molar ratio of Cholesterol/D-Lin-DMA/DSPC/PEG-C-DMA. The resulting SNALP liposomes can be about 80-100 nm in size. A SNALP may comprise synthetic cholesterol (Sigma-Aldrich, St Louis, Mo., USA), dipalmitoylphosphatidylcholine (Avanti Polar Lipids, Alabaster, Ala., USA), 3-N-[(w-methoxy poly(ethylene glycol)2000)carbamoyl]-1,2-dimyrestyloxypropylamine, and cationic 1,2-dilinoleyloxy-3-N,N-dimethylaminopropane. A SNALP may comprise synthetic cholesterol (Sigma-Aldrich), 1,2-distearoyl-sn-glycero-3-phosphocholine (DSPC; Avanti Polar Lipids Inc.), PEG-cDMA, and 1,2-dilinoleyloxy-3-(N;N-dimethyl)aminopropane (DLinDMA).

[0241] Other cationic lipids, such as amino lipid 2,2-dilinoleyl-4-dimethylaminoethyl-[1,3]-dioxolane (DLin-KC2-DMA) can be used to deliver an RNA-guided effector polypeptide of the present disclosure, a fusion polypeptide of the present disclosure, an RNP of the present disclosure, a nucleic acid of the present disclosure, or a system of the present disclosure, to a target cell. A preformed vesicle with the following lipid composition may be contemplated: amino lipid, distearoylphosphatidylcholine (DSPC), cholesterol and (R)-2,3-bis(octadecyloxy) propyl-1-(methoxy poly(ethylene glycol)2000)propylcarbamate (PEG-lipid) in the molar ratio 40/10/40/10, respectively, and a FVII siRNA/total lipid ratio of approximately 0.05 (w/w). To ensure a narrow particle size distribution in the range of 70-90 nm and a low polydispersity index of 0.11.+−.0.04 (n=56), the particles may be extruded up to three times through 80 nm membranes prior to adding the guide RNA. Particles containing the highly potent amino lipid 16 may be used, in which the molar ratio of the four lipid components 16, DSPC, cholesterol and PEG-lipid (50/10/38.5/1.5) which may be further optimized to enhance in vivo activity.

[0242] Lipids may be formulated with a system of the present disclosure or component(s) thereof or nucleic acids encoding the same to form lipid nanoparticles (LNPs). Suitable lipids include, but are not limited to, DLin-KC2-DMA4, C12-200 and colipids disteroylphosphatidyl choline, cholesterol, and PEG-DMG may be formulated with a system, or component thereof, of the present disclosure, using a spontaneous vesicle formation procedure. The component molar ratio may be about 50/10/38.5/1.5 (DLin-KC2-DMA or C12-200/disteroylphosphatidyl choline/cholesterol/PEG-DMG).

[0243] A system of the present disclosure, or a component thereof, may be delivered encapsulated in PLGA microspheres such as that further described in US published applications 20130252281 and 20130245107 and 20130244279.

[0244] Supercharged proteins can be used to deliver an RNA-guided effector polypeptide of the present disclosure, a fusion polypeptide of the present disclosure, an RNP of the present disclosure, a nucleic acid of the present disclosure, or a system of the present disclosure, to a target cell. Supercharged proteins are a class of engineered or naturally occurring proteins with unusually high positive or negative net theoretical charge. Both supernegatively and superpositively charged proteins exhibit the ability to withstand thermally or chemically induced aggregation. Superpositively charged proteins are also able to penetrate mammalian cells. Associating cargo with these proteins, such as plasmid DNA, RNA, or other proteins, can facilitate the functional delivery of these macromolecules into mammalian cells both in vitro and in vivo.

[0245] Cell Penetrating Peptides (CPPs) can be used to deliver an RNA-guided effector polypeptide of the present disclosure, a fusion polypeptide of the present disclosure, an RNP of the present disclosure, a nucleic acid of the present disclosure, or a system of the present disclosure, to a target cell. CPPs typically have an amino acid composition that either contains a high relative abundance of positively charged amino acids such as lysine or arginine or has sequences that contain an alternating pattern of polar/charged amino acids and non-polar, hydrophobic amino acids.

[0246] An implantable device can be used to deliver an RNA-guided effector polypeptide of the present disclosure, a fusion polypeptide of the present disclosure, an RNP of the present disclosure, a nucleic acid of the present disclosure (e.g., a guide RNA, a nucleic acid encoding a guide RNA, a nucleic acid encoding an RNA-guided effector polypeptide, a donor template, and the like), or a system of the present disclosure, to a target cell (e.g., a target cell in vivo, where the target cell is a target cell in circulation, a target cell in a tissue, a target cell in an organ, etc.). An implantable device suitable for use in delivering an RNA-guided effector polypeptide of the present disclosure, a fusion polypeptide of the present disclosure, an RNP of the present disclosure, a nucleic acid of the present disclosure, or a system of the present disclosure, to a target cell (e.g., a target cell in vivo, where the target cell is a target cell in circulation, a target cell in a tissue, a target cell in an organ, etc.) can include a container (e.g., a reservoir, a matrix, etc.) that comprises the RNA-guided effector polypeptide, the fusion polypeptide, the RNP, or the system (or component thereof, e.g., a nucleic acid of the present disclosure).

[0247] A suitable implantable device can comprise a polymeric substrate, such as a matrix for example, that is used as the device body, and in some cases additional scaffolding materials, such as metals or additional polymers, and materials to enhance visibility and imaging. An implantable delivery device can be advantageous in providing release locally and over a prolonged period, where the polypeptide and/or nucleic acid to be delivered is released directly to a target site, e.g., the extracellular matrix (ECM), the vasculature surrounding a tumor, a diseased tissue, etc. Suitable implantable delivery devices include devices suitable for use in delivering to a cavity such as the abdominal cavity and/or any other type of administration in which the drug delivery system is not anchored or attached, comprising a biostable and/or degradable and/or bioabsorbable polymeric substrate, which may for example optionally be a matrix. In some cases, a suitable implantable drug delivery device comprises degradable polymers, wherein the main release mechanism is bulk erosion. In some cases, a suitable implantable drug delivery device comprises non degradable, or slowly degraded polymers, wherein the main release mechanism is diffusion rather than bulk erosion, so that the outer part functions as membrane, and its internal part functions as a drug reservoir, which practically is not affected by the surroundings for an extended period (for example from about a week to about a few months). Combinations of different polymers with different release mechanisms may also optionally be used. The concentration gradient at the can be maintained effectively constant during a significant period of the total releasing period, and therefore the diffusion rate is effectively constant (termed “zero mode” diffusion). By the term “constant” it is meant a diffusion rate that is maintained above the lower threshold of therapeutic effectiveness, but which may still optionally feature an initial burst and/or may fluctuate, for example increasing and decreasing to a certain degree. The diffusion rate can be so maintained for a prolonged period, and it can be considered constant to a certain level to optimize the therapeutically effective period, for example the effective silencing period.

[0248] In some cases, the implantable delivery system is designed to shield the nucleotide based therapeutic agent from degradation, whether chemical in nature or due to attack from enzymes and other factors in the body of the subject.

[0249] The site for implantation of the device, or target site, can be selected for maximum therapeutic efficacy. For example, a delivery device can be implanted within or in the proximity of a tumor environment, or the blood supply associated with a tumor. The target location can be, e.g.: 1) the brain at degenerative sites like in Parkinson or Alzheimer disease at the basal ganglia, white and gray matter; 2) the spine, as in the case of amyotrophic lateral sclerosis (ALS); 3) uterine cervix; 4) active and chronic inflammatory joints; 5) dermis as in the case of psoriasis; 7) sympathetic and sensoric nervous sites for analgesic effect; 7) a bone; 8) a site of acute or chronic infection; 9) Intra vaginal; 10) Inner ear—auditory system, labyrinth of the inner ear, vestibular system; 11) Intra tracheal; 12) Intra-cardiac; coronary, epicardiac; 13) urinary tract or bladder; 14) biliary system; 15) parenchymal tissue including and not limited to the kidney, liver, spleen; 16) lymph nodes; 17) salivary glands; 18) dental gums; 19) Intra-articular (into joints); 20) Intra-ocular; 21) Brain tissue; 22) Brain ventricles; 23) Cavities, including abdominal cavity (for example but without limitation, for ovary cancer); 24) Intra esophageal; and 25) Intra rectal; and 26) into the vasculature.

[0250] The method of insertion, such as implantation, may optionally already be used for other types of tissue implantation and/or for insertions and/or for sampling tissues, optionally without modifications, or alternatively optionally only with non-major modifications in such methods. Such methods optionally include but are not limited to brachytherapy methods, biopsy, endoscopy with and/or without ultrasound, such as stereotactic methods into the brain tissue, laparoscopy, including implantation with a laparoscope into joints, abdominal organs, the bladder wall and body cavities.

### Modified Host Cells

[0251] The present disclosure provides a modified cell comprising an RNA-guided effector polypeptide of the present disclosure and/or a nucleic acid comprising a nucleotide sequence encoding an RNA-guided effector polypeptide of the present disclosure. The present disclosure provides a modified cell comprising an RNA-guided effector polypeptide of the present disclosure, where the modified cell is a cell that does not normally comprise the RNA-guided effector polypeptide. The present disclosure provides a modified cell (e.g., a genetically modified cell) comprising nucleic acid comprising a nucleotide sequence encoding an RNA-guided effector polypeptide of the present disclosure. The present disclosure provides a genetically modified cell that is genetically modified with an mRNA comprising a nucleotide sequence encoding an RNA-guided effector polypeptide of the present disclosure. The present disclosure provides a genetically modified cell that is genetically modified with a recombinant expression vector comprising a nucleotide sequence encoding an RNA-guided effector polypeptide of the present disclosure. The present disclosure provides a genetically modified cell that is genetically modified with a recombinant expression vector comprising: a) a nucleotide sequence encoding an RNA-guided effector polypeptide of the present disclosure; and b) a nucleotide sequence encoding a guide RNA of the present disclosure. The present disclosure provides a genetically modified cell that is genetically modified with a recombinant expression vector comprising: a) a nucleotide sequence encoding an RNA-guided effector polypeptide of the present disclosure; b) a nucleotide sequence encoding a guide RNA of the present disclosure; and c) a nucleotide sequence encoding a donor template.

[0252] The present disclosure provides a modified cell comprising a fusion polypeptide of the present disclosure and/or a nucleic acid comprising a nucleotide sequence encoding a fusion polypeptide of the present disclosure. The present disclosure provides a modified cell comprising a fusion polypeptide of the present disclosure, where the modified cell is a cell that does not normally comprise the fusion polypeptide. The present disclosure provides a modified cell (e.g., a genetically modified cell) comprising nucleic acid comprising a nucleotide sequence encoding a fusion polypeptide of the present disclosure. The present disclosure provides a genetically modified cell that is genetically modified with an mRNA comprising a nucleotide sequence encoding a fusion polypeptide of the present disclosure. The present disclosure provides a genetically modified cell that is genetically modified with a recombinant expression vector comprising a nucleotide sequence encoding a fusion polypeptide of the present disclosure. The present disclosure provides a genetically modified cell that is genetically modified with a recombinant expression vector comprising: a) a nucleotide sequence encoding a fusion polypeptide of the present disclosure; and b) a nucleotide sequence encoding a guide RNA of the present disclosure. The present disclosure provides a genetically modified cell that is genetically modified with a recombinant expression vector comprising: a) a nucleotide sequence encoding a fusion polypeptide of the present disclosure; b) a nucleotide sequence encoding a guide RNA of the present disclosure; and c) a nucleotide sequence encoding a donor template.

[0253] A cell that serves as a recipient for an RNA-guided effector polypeptide of the present disclosure and/or a nucleic acid comprising a nucleotide sequence encoding an RNA-guided effector polypeptide of the present disclosure and/or a guide RNA of the present disclosure, or that serves as a recipient for a fusion polypeptide of the present disclosure and/or a nucleic acid comprising a nucleotide sequence encoding a fusion polypeptide of the present disclosure and/or a guide RNA of the present disclosure, can be any of a variety of cells, including, e.g., in vitro cells; in vivo cells; ex vivo cells; primary cells; cancer cells; animal cells; plant cells; algal cells; fungal cells; etc. A cell that serves as a recipient for an RNA-guided effector polypeptide of the present disclosure and/or a nucleic acid comprising a nucleotide sequence encoding an RNA-guided effector polypeptide of the present disclosure and/or a guide RNA of the present disclosure, or that serves as a recipient for a fusion polypeptide of the present disclosure and/or a nucleic acid comprising a nucleotide sequence encoding a fusion polypeptide of the present disclosure and/or a guide RNA of the present disclosure, is referred to as a “host cell” or a “target cell.” A host cell or a target cell can be a recipient of a system of the present disclosure. A host cell or a target cell can be a recipient of an RNP of the present disclosure. A host cell or a target cell can be a recipient of a single component of a system of the present disclosure.

[0254] Non-limiting examples of cells (target cells) include: a prokaryotic cell, eukaryotic cell, a bacterial cell, an archaeal cell, a cell of a single-cell eukaryotic organism, a protozoa cell, a cell from a plant (e.g., cells from plant crops, fruits, vegetables, grains, soy bean, corn, maize, wheat, seeds, tomatoes, rice, cassava, sugarcane, pumpkin, hay, potatoes, cotton, cannabis, tobacco, flowering plants, conifers, gymnosperms, angiosperms, ferns, clubmosses, hornworts, liverworts, mosses, dicotyledons, monocotyledons, etc.), an algal cell, (e.g., Botryococcus braunii, Chlamydomonas reinhardtii, Nannochloropsis gaditana, Chlorella pyrenoidosa, Sargassum patens, C. agardh, and the like), seaweeds (e.g. kelp) a fungal cell (e.g., a yeast cell, a cell from a mushroom), an animal cell, a cell from an invertebrate animal (e.g., fruit fly, cnidarian, echinoderm, nematode, etc.), a cell from a vertebrate animal (e.g., fish, amphibian, reptile, bird, mammal), a cell from a mammal (e.g., an ungulate (e.g., a pig, a cow, a goat, a sheep); a rodent (e.g., a rat, a mouse); a non-human primate; a human; a feline (e.g., a cat); a canine (e.g., a dog); etc.), and the like. In some cases, the cell is a cell that does not originate from a natural organism (e.g., the cell can be a synthetically made cell; also referred to as an artificial cell).

[0255] A cell can be an in vitro cell (e.g., established cultured cell line). A cell can be an ex vivo cell (cultured cell from an individual). A cell can be and in vivo cell (e.g., a cell in an individual). A cell can be an isolated cell. A cell can be a cell inside of an organism. A cell can be an organism. A cell can be a cell in a cell culture (e.g., in vitro cell culture). A cell can be one of a collection of cells. A cell can be a prokaryotic cell or derived from a prokaryotic cell. A cell can be a bacterial cell or can be derived from a bacterial cell. A cell can be an archaeal cell or derived from an archaeal cell. A cell can be a eukaryotic cell or derived from a eukaryotic cell. A cell can be a plant cell or derived from a plant cell. A cell can be an animal cell or derived from an animal cell. A cell can be an invertebrate cell or derived from an invertebrate cell. A cell can be a vertebrate cell or derived from a vertebrate cell. A cell can be a mammalian cell or derived from a mammalian cell. A cell can be a rodent cell or derived from a rodent cell. A cell can be a human cell or derived from a human cell. A cell can be a microbe cell or derived from a microbe cell. A cell can be a fungi cell or derived from a fungi cell. A cell can be an insect cell. A cell can be an arthropod cell. A cell can be a protozoan cell. A cell can be a helminth cell.

[0256] Suitable cells include a stem cell (e.g. an embryonic stem (ES) cell, an induced pluripotent stem (iPS) cell; a germ cell (e.g., an oocyte, a sperm, an oogonia, a spermatogonia, etc.); a somatic cell, e.g. a fibroblast, an oligodendrocyte, a glial cell, a hematopoietic cell, a neuron, a muscle cell, a bone cell, a hepatocyte, a pancreatic cell, etc.

[0257] Suitable cells include human embryonic stem cells, fetal cardiomyocytes, myofibroblasts, mesenchymal stem cells cardiomyocytes, adipocytes, totipotent cells, pluripotent cells, blood stem cells, myoblasts, adult stem cells, bone marrow cells, mesenchymal cells, embryonic stem cells, parenchymal cells, epithelial cells, endothelial cells, mesothelial cells, fibroblasts, osteoblasts, chondrocytes, exogenous cells, endogenous cells, stem cells, hematopoietic stem cells, bone-marrow derived progenitor cells, myocardial cells, skeletal cells, fetal cells, undifferentiated cells, multi-potent progenitor cells, unipotent progenitor cells, monocytes, cardiac myoblasts, skeletal myoblasts, macrophages, capillary endothelial cells, xenogenic cells, allogenic cells, and post-natal stem cells.

[0258] In some cases, the cell is an immune cell, a neuron, an epithelial cell, and endothelial cell, or a stem cell. In some cases, the immune cell is a T cell, a B cell, a monocyte, a natural killer cell, a dendritic cell, or a macrophage. In some cases, the immune cell is a cytotoxic T cell. In some cases, the immune cell is a helper T cell. In some cases, the immune cell is a regulatory T cell (Treg). In some cases, the immune cell is a T effector cell.

[0259] In some cases, the cell is a stem cell. Stem cells include adult stem cells. Adult stem cells are also referred to as somatic stem cells.

[0260] Adult stem cells are resident in differentiated tissue, but retain the properties of self-renewal and ability to give rise to multiple cell types, usually cell types typical of the tissue in which the stem cells are found. Numerous examples of somatic stem cells are known to those of skill in the art, including muscle stem cells; hematopoietic stem cells; epithelial stem cells; neural stem cells; mesenchymal stem cells; mammary stem cells; intestinal stem cells; mesodermal stem cells; endothelial stem cells; olfactory stem cells; neural crest stem cells; and the like.

[0261] Stem cells of interest include mammalian stem cells, where the term “mammalian” refers to any animal classified as a mammal, including humans; non-human primates; domestic and farm animals; and zoo, laboratory, sports, or pet animals, such as dogs, horses, cats, cows, mice, rats, rabbits, etc. In some cases, the stem cell is a human stem cell. In some cases, the stem cell is a rodent (e.g., a mouse; a rat) stem cell. In some cases, the stem cell is a non-human primate stem cell.

[0262] Stem cells can express one or more stem cell markers, e.g., SOX9, KRT19, KRT7, LGR5, CA9, FXYD2, CDH6, CLDN18, TSPAN8, BPIFB1, OLFM4, CDH17, and PPARGC1A.

[0263] In some embodiments, the stem cell is a hematopoietic stem cell (HSC). HSCs are mesoderm-derived cells that can be isolated from bone marrow, blood, cord blood, fetal liver and yolk sac. HSCs are characterized as CD34⁺ and CD3⁻. HSCs can repopulate the erythroid, neutrophil-macrophage, megakaryocyte and lymphoid hematopoietic cell lineages in vivo. In vitro, HSCs can be induced to undergo at least some self-renewing cell divisions and can be induced to differentiate to the same lineages as is seen in vivo. As such, HSCs can be induced to differentiate into one or more of erythroid cells, megakaryocytes, neutrophils, macrophages, and lymphoid cells.

[0264] In other embodiments, the stem cell is a neural stem cell (NSC). Neural stem cells (NSCs) are capable of differentiating into neurons, and glia (including oligodendrocytes, and astrocytes). A neural stem cell is a multipotent stem cell which is capable of multiple divisions, and under specific conditions can produce daughter cells which are neural stem cells, or neural progenitor cells that can be neuroblasts or glioblasts, e.g., cells committed to become one or more types of neurons and glial cells respectively. Methods of obtaining NSCs are known in the art.

[0265] In other embodiments, the stem cell is a mesenchymal stem cell (MSC). MSCs originally derived from the embryonal mesoderm and isolated from adult bone marrow, can differentiate to form muscle, bone, cartilage, fat, marrow stroma, and tendon. Methods of isolating MSC are known in the art; and any known method can be used to obtain MSC. See, e.g., U.S. Pat. No. 5,736,396, which describes isolation of human MSC.

[0266] A cell is in some cases a plant cell. A plant cell can be a cell of a monocotyledon. A cell can be a cell of a dicotyledon.

[0267] In some cases, the cell is a plant cell. For example, the cell can be a cell of a major agricultural plant, e.g., Barley, Beans (Dry Edible), Canola, Corn, Cotton (Pima), Cotton (Upland), Flaxseed, Hay (Alfalfa), Hay (Non-Alfalfa), Oats, Peanuts, Rice, Sorghum, Soybeans, Sugarbeets, Sugarcane, Sunflowers (Oil), Sunflowers (Non-Oil), Sweet Potatoes, Tobacco (Burley), Tobacco (Flue-cured), Tomatoes, Wheat (Durum), Wheat (Spring), Wheat (Winter), and the like. As another example, the cell is a cell of a vegetable crops which include but are not limited to, e.g., alfalfa sprouts, aloe leaves, arrow root, arrowhead, artichokes, asparagus, bamboo shoots, banana flowers, bean sprouts, beans, beet tops, beets, bittermelon, bok choy, broccoli, broccoli rabe (rappini), brussels sprouts, cabbage, cabbage sprouts, cactus leaf (nopales), calabaza, cardoon, carrots, cauliflower, celery, chayote, chinese artichoke (crosnes), chinese cabbage, chinese celery, chinese chives, choy sum, chrysanthemum leaves (tung ho), collard greens, corn stalks, corn-sweet, cucumbers, daikon, dandelion greens, dasheen, dau mue (pea tips), donqua (winter melon), eggplant, endive, escarole, fiddle head ferns, field cress, frisee, gai choy (chinese mustard), gailon, galanga (siam, thai ginger), garlic, ginger root, gobo, greens, hanover salad greens, huauzontle, jerusalem artichokes, jicama, kale greens, kohlrabi, lamb's quarters (quilete), lettuce (bibb), lettuce (boston), lettuce (boston red), lettuce (green leaf), lettuce (iceberg), lettuce (lolla rossa), lettuce (oak leaf—green), lettuce (oak leaf—red), lettuce (processed), lettuce (red leaf), lettuce (romaine), lettuce (ruby romaine), lettuce (russian red mustard), linkok, lo bok, long beans, lotus root, mache, maguey (agave) leaves, malanga, mesculin mix, mizuna, moap (smooth luffa), moo, moqua (fuzzy squash), mushrooms, mustard, nagaimo, okra, ong choy, onions green, opo (long squash), ornamental corn, ornamental gourds, parsley, parsnips, peas, peppers (bell type), peppers, pumpkins, radicchio, radish sprouts, radishes, rape greens, rape greens, rhubarb, romaine (baby red), rutabagas, salicornia (sea bean), sinqua (angled/ridged luffa), spinach, squash, straw bales, sugarcane, sweet potatoes, swiss chard, tamarindo, taro, taro leaf, taro shoots, tatsoi, tepeguaje (guaje), tindora, tomatillos, tomatoes, tomatoes (cherry), tomatoes (grape type), tomatoes (plum type), tumeric, turnip tops greens, turnips, water chestnuts, yampi, yams (names), yu choy, yuca (cassava), and the like.

[0268] A cell is in some cases an arthropod cell. For example, the cell can be a cell of a sub-order, a family, a sub-family, a group, a sub-group, or a species of, e.g., Chelicerata, Myriapodia, Hexipodia, Arachnida, Insecta, Archaeognatha, Thysanura, Palaeoptera, Ephemeroptera, Odonata, Anisoptera, Zygoptera, Neoptera, Exopter ygota, Plecoptera, Embioptera, Orthoptera, Zoraptera, Dermaptera, Dictyoptera, Notoptera, Grylloblattidae, Mantophasmatidae, Phasmatodea, Blattaria, Isoptera, Mantodea, Parapneuroptera, Psocoptera, Thysanoptera, Phthiraptera, Hemiptera, Endopterygota or Holometabola, Hymenoptera, Coleoptera, Strepsiptera, Raphidioptera, Megaloptera, Neuroptera, Mecoptera, Siphonaptera, Diptera, Trichoptera, or Lepidoptera.

[0269] A cell is in some cases an insect cell. For example, in some cases, the cell is a cell of a mosquito, a grasshopper, a true bug, a fly, a flea, a bee, a wasp, an ant, a louse, a moth, or a beetle.

### Kits

[0270] The present disclosure provides a kit comprising a system of the present disclosure, or a component of a system of the present disclosure.

[0271] A kit of the present disclosure can comprise: a) a an RNA-guided effector polypeptide of the present disclosure and a guide RNA; b) a fusion polypeptide of the present disclosure and a guide RNA; c) a fusion polypeptide of the present disclosure, a guide RNA, and a donor template nucleic acid; d) an mRNA encoding an RNA-guided effector polypeptide of the present disclosure; and a guide RNA; e) an mRNA encoding a fusion polypeptide of the present disclosure; and a guide RNA; f) an mRNA encoding a fusion polypeptide of the present disclosure, a guide RNA, and a donor template nucleic acid; g) a recombinant expression vector comprising a nucleotide sequence encoding an RNA-guided effector polypeptide of the present disclosure and a nucleotide sequence encoding a guide RNA; h) a recombinant expression vector comprising a nucleotide sequence encoding a fusion polypeptide of the present disclosure and a nucleotide sequence encoding a guide RNA; i) a recombinant expression vector comprising a nucleotide sequence encoding a fusion polypeptide of the present disclosure, a nucleotide sequence encoding a guide RNA, and a nucleotide sequence encoding a donor template nucleic acid; j) a first recombinant expression vector comprising a nucleotide sequence encoding an RNA-guided effector polypeptide of the present disclosure, and a second recombinant expression vector comprising a nucleotide sequence encoding a guide RNA; k) a first recombinant expression vector comprising a nucleotide sequence encoding a fusion polypeptide of the present disclosure, and a second recombinant expression vector comprising a nucleotide sequence encoding a guide RNA; l) a first recombinant expression vector comprising a nucleotide sequence encoding a fusion polypeptide of the present disclosure, and a second recombinant expression vector comprising a nucleotide sequence encoding a guide RNA; and a donor template nucleic acid; m) a recombinant expression vector comprising a nucleotide sequence encoding an RNA-guided effector polypeptide of the present disclosure, a nucleotide sequence encoding a first guide RNA, and a nucleotide sequence encoding a second guide RNA; or n) a recombinant expression vector comprising a nucleotide sequence encoding a fusion polypeptide of the present disclosure, a nucleotide sequence encoding a first guide RNA, and a nucleotide sequence encoding a second guide RNA; or some variation of one of (a) through (n).

[0272] In some cases, a kit of the present disclosure comprises: a) a RNA-guided effector polypeptide of the present disclosure, or the fusion polypeptide of the present disclosure; and b) a guide RNA, or a nucleic acid encoding the guide RNA, wherein the guide RNA comprises a guide sequence that is complementary to a target sequence of a target nucleic acid, and comprises a region that can bind to the RNA-guided effector polypeptide. In some cases, the guide RNA is a single-molecule guide RNA. In some cases, the RNA-guided effector polypeptide and the guide RNA are in separate containers. In some cases, the RNA-guided effector polypeptide and the guide RNA are together in a single container. In some cases, the guide RNA comprises one or more of: a modified nucleobase, a modified backbone or non-natural internucleoside linkage, a modified sugar moiety, a Locked Nucleic Acid, a Peptide Nucleic Acid, and a deoxyribonucleotide. In some cases, the kit further comprises a donor nucleic acid template.

[0273] A kit of the present disclosure can comprise: a) a component, as described above, of a system of the present disclosure, or can comprise a system of the present disclosure; and b) one or more additional reagents, e.g., i) a buffer; ii) a protease inhibitor; iii) a nuclease inhibitor; iv) a reagent required to develop or visualize a detectable label; v) a positive and/or negative control target DNA; vi) a positive and/or negative control guide RNA; and the like. A kit of the present disclosure can comprise: a) a component, as described above, of a system of the present disclosure, or can comprise a system of the present disclosure; and b) a therapeutic agent.

[0274] A kit of the present disclosure can comprise a recombinant expression vector comprising: a) an insertion site for inserting a nucleic acid comprising a nucleotide sequence encoding a portion of a guide RNA that hybridizes to a target nucleotide sequence in a target nucleic acid; and b) a nucleotide sequence encoding the RNA-guided effector protein-binding portion of a guide RNA. A kit of the present disclosure can comprise a recombinant expression vector comprising: a) an insertion site for inserting a nucleic acid comprising a nucleotide sequence encoding a portion of a guide RNA that hybridizes to a target nucleotide sequence in a target nucleic acid; b) a nucleotide sequence encoding the RNA-guided effector protein-binding portion of a guide RNA; and c) a nucleotide sequence encoding RNA-guided effector polypeptide of the present disclosure.

[0275] A kit of the present disclosure can comprise a recombinant expression vector comprising: i) a nucleotide sequence encoding an RNA-guided effector polypeptide of the present disclosure; and ii) an insertion site for a nucleic acid comprising a nucleotide sequence encoding a heterologous fusion partner of interest. The insertion site can be located relative to the nucleotide sequence encoding the RNA-guided effector polypeptide, such that, after insertion of a nucleic acid comprising a nucleotide sequence encoding a heterologous fusion partner of interest, the resulting fusion polypeptide would comprise, in order from N-terminus to C-terminus: i) the RNA-guided effector polypeptide; and ii) the fusion partner. The insertion site can be located relative to the nucleotide sequence encoding the RNA-guided effector polypeptide, such that, after insertion of a nucleic acid comprising a nucleotide sequence encoding a heterologous fusion partner of interest, the resulting fusion polypeptide would comprise, in order from N-terminus to C-terminus: i) the fusion partner; and ii) the RNA-guided effector polypeptide. A kit of the present disclosure can comprise a recombinant expression vector comprising: i) a nucleotide sequence encoding an RNA-guided effector polypeptide of the present disclosure; ii) an insertion site for a nucleic acid comprising a nucleotide sequence encoding a heterologous fusion partner of interest; iii) an insertion site for inserting a nucleic acid comprising a nucleotide sequence encoding a portion of a guide RNA that hybridizes to a target nucleotide sequence in a target nucleic acid; and iv) a nucleotide sequence encoding the RNA-guided effector protein-binding portion of a guide RNA

### Utility

[0276] An RNA-guided effector polypeptide of the present disclosure, or a fusion polypeptide of the present disclosure, finds use in a variety of methods (e.g., in combination with a guide RNA and in some cases further in combination with a donor template). An RNA-guided effector polypeptide of the present disclosure can be used to bind to a target nucleic acid. For example, a fusion polypeptide of the present disclosure can be used to (i) modify (e.g., cleave, e.g., nick; methylate; etc.) target nucleic acid (DNA or RNA; single stranded or double stranded); (ii) modulate transcription of a target nucleic acid; (iii) label a target nucleic acid; (iv) bind a target nucleic acid (e.g., for purposes of isolation, labeling, imaging, tracking, etc.); (v) modify a polypeptide (e.g., a histone) associated with a target nucleic acid; and the like. Thus, the present disclosure provides a method of modifying a target nucleic acid. In some cases, a method of the present disclosure for modifying a target nucleic acid comprises contacting the target nucleic acid with: a) a fusion polypeptide of the present disclosure; and b) one or more (e.g., two) guide RNAs. In some cases, a method of the present disclosure for modifying a target nucleic acid comprises contacting the target nucleic acid with: a) a fusion polypeptide of the present disclosure; b) a guide RNA; and c) a donor nucleic acid (e.g., a donor template). In some cases, the contacting step is carried out in a cell in vitro. In some cases, the contacting step is carried out in a cell in vivo. In some cases, the contacting step is carried out in a cell ex vivo.

[0277] In some cases, a method of the present disclosure is a method of binding to a target nucleic acid. Because a method that uses an RNA-guided effector polypeptide includes binding of the RNA-guided effector polypeptide to a particular region in a target nucleic acid (by virtue of being targeted there by an associated guide RNA), the methods are generally referred to herein as methods of binding (e.g., a method of binding a target nucleic acid). However, it is to be understood that in some cases, while a method of binding may result in nothing more than binding of the target nucleic acid, in other cases, the method can have different final results (e.g., the method can result in modification of the target nucleic acid, e.g., cleavage/methylation/etc., modulation of transcription from the target nucleic acid; modulation of translation of the target nucleic acid; genome editing; modulation of a protein associated with the target nucleic acid; isolation of the target nucleic acid; etc.).

[0278] The present disclosure provides a method of binding and/or modifying a target nucleic acid and/or modifying a polypeptide that binds to a target nucleic acid, the method comprising contacting the target nucleic acid with: i) an RNA-guided effector polypeptide of the present disclosure; or ii) a fusion polypeptide of the present disclosure. In some cases, the target nucleic acid is selected from: double stranded DNA, single stranded DNA, RNA, genomic DNA, and extrachromosomal DNA. In some cases, the contacting results in genome editing. In some cases, the contacting takes place outside of a bacterial cell and outside of an archaeal cell. In some cases, the contacting takes place in vitro outside of a cell. In some cases, the contacting takes place inside of a target cell. In some cases, the target cell is a eukaryotic cell. In some cases, the target cell is in vivo. In some cases, the target cell is ex vivo. In some cases, the eukaryotic cell is selected from the group consisting of: a plant cell, a fungal cell, a single cell eukaryotic organism, a mammalian cell, a reptile cell, an insect cell, an avian cell, a fish cell, a parasite cell, an arthropod cell, a cell of an invertebrate, a cell of a vertebrate, a rodent cell, a mouse cell, a rat cell, a primate cell, a non-human primate cell, and a human cell. In some cases, the method further comprises introducing a DNA donor template into the target cell.

[0279] For examples of suitable methods, see, for example, Jinek et al., Science. 2012 Aug. 17; 337(6096):816-21; Chylinski et al., RNA Biol. 2013 May; 10(5):726-37; Ma et al., Biomed Res Int. 2013; 2013:270805; Hou et al., Proc Natl Acad Sci USA. 2013 Sep. 24; 110(39):15644-9; Jinek et al., Elife. 2013; 2:e00471; Pattanayak et al., Nat Biotechnol. 2013 September; 31(9):839-43; Qi et al, Cell. 2013 Feb. 28; 152(5):1173-83; Wang et al., Cell. 2013 May 9; 153(4):910-8; Auer et al., Genome Res. 2013 Oct. 31; Chen et al., Nucleic Acids Res. 2013 Nov. 1; 41(20):e19; Cheng et al., Cell Res. 2013 October; 23(10):1163-71; Cho et al., Genetics. 2013 November; 195(3):1177-80; DiCarlo et al., Nucleic Acids Res. 2013 April; 41(7):4336-43; Dickinson et al., Nat Methods. 2013 October; 10(10):1028-34; Ebina et al., Sci Rep. 2013; 3:2510; Fujii et al, Nucleic Acids Res. 2013 Nov. 1; 41(20):e187; Hu et al., Cell Res. 2013 November; 23(11):1322-5; Jiang et al., Nucleic Acids Res. 2013 Nov. 1; 41(20):e188; Larson et al., Nat Protoc. 2013 November; 8(11):2180-96; Mali et. at., Nat Methods. 2013 October; 10(10):957-63; Nakayama et al., Genesis. 2013 December; 51(12):835-43; Ran et al., Nat Protoc. 2013 November; 8(11):2281-308; Ran et al., Cell. 2013 Sep. 12; 154(6):1380-9; Upadhyay et al., G3 (Bethesda). 2013 Dec. 9; 3(12):2233-8; Walsh et al., Proc Natl Acad Sci USA. 2013 Sep. 24; 110(39):15514-5; Xie et al., Mol Plant. 2013 Oct. 9; Yang et al., Cell. 2013 Sep. 12; 154(6):1370-9; and U.S. patents and patent applications: U.S. Pat. Nos. 8,906,616; 8,895,308; 8,889,418; 8,889,356; 8,871,445; 8,865,406; 8,795,965; 8,771,945; 8,697,359; 20140068797; 20140170753; 20140179006; 20140179770; 20140186843; 20140186919; 20140186958; 20140189896; 20140227787; 20140234972; 20140242664; 20140242699; 20140242700; 20140242702; 20140248702; 20140256046; 20140273037; 20140273226; 20140273230; 20140273231; 20140273232; 20140273233; 20140273234; 20140273235; 20140287938; 20140295556; 20140295557; 20140298547; 20140304853; 20140309487; 20140310828; 20140310830; 20140315985; 20140335063; 20140335620; 20140342456; 20140342457; 20140342458; 20140349400; 20140349405; 20140356867; 20140356956; 20140356958; 20140356959; 20140357523; 20140357530; 20140364333; and 20140377868; each of which is hereby incorporated by reference in its entirety.

[0280] For example, where a method of the present disclosure comprises contacting a target nucleic acid with a fusion polypeptide of the present disclosure complexed with a guide RNA, the present disclosure provides (but is not limited to) methods of cleaving a target nucleic acid; methods of editing a target nucleic acid; methods of modulating transcription from a target nucleic acid; methods of isolating a target nucleic acid, methods of binding a target nucleic acid, methods of imaging a target nucleic acid, methods of modifying a target nucleic acid, and the like.

[0281] As used herein, the terms/phrases “contact a target nucleic acid” and “contacting a target nucleic acid”, for example, with an RNA-guided effector polypeptide or with a fusion polypeptide, etc., encompass all methods for contacting the target nucleic acid. For example, an RNA-guided effector polypeptide can be provided to a cell as protein, RNA (encoding the RNA-guided effector polypeptide), or DNA (encoding the RNA-guided effector polypeptide); while a guide RNA can be provided as a guide RNA or as a nucleic acid encoding the guide RNA. As another example, a fusion polypeptide can be provided to a cell as protein, RNA (encoding the fusion polypeptide), or DNA (encoding the fusion polypeptide); while a guide RNA can be provided as a guide RNA or as a nucleic acid encoding the guide RNA. As such, when, for example, performing a method in a cell (e.g., inside of a cell in vitro, inside of a cell in vivo, inside of a cell ex vivo), a method that includes contacting the target nucleic acid encompasses the introduction into the cell of any or all of the components in their active/final state (e.g., in the form of a protein(s) for an RNA-guided effector polypeptide; in the form of a protein for a fusion polypeptide; in the form of an RNA in some cases for the guide RNA), and also encompasses the introduction into the cell of one or more nucleic acids encoding one or more of the components (e.g., nucleic acid(s) comprising nucleotide sequence(s) encoding RNA-guided effector polypeptide or a fusion polypeptide, nucleic acid(s) comprising nucleotide sequence(s) encoding guide RNA(s), nucleic acid comprising a nucleotide sequence encoding a donor template, and the like). Because the methods can also be performed in vitro outside of a cell, a method that includes contacting a target nucleic acid, (unless otherwise specified) encompasses contacting outside of a cell in vitro, inside of a cell in vitro, inside of a cell in vivo, inside of a cell ex vivo, etc.

[0282] In some cases, a method of the present disclosure for modifying a target nucleic acid comprises contacting a target nucleic acid with RNA-guided effector polypeptide of the present disclosure, or with a fusion polypeptide of the present disclosure. In some cases, a method of the present disclosure for modifying a target nucleic acid comprises contacting the target nucleic acid with a fusion polypeptide of the present disclosure and a guide RNA. In some cases, a method of the present disclosure for binding a target nucleic acid comprises contacting the target nucleic acid with an RNA-guided effector polypeptide of the present disclosure, and a guide RNA.

### Target Nucleic Acids and Target Cells of Interest

[0283] An RNA-guided effector polypeptide of the present disclosure, or a fusion polypeptide of the present disclosure, when bound to a guide RNA, can bind to a target nucleic acid (e.g., in the case of an RNA-guided effector polypeptide of the present disclosure), and in some cases, can bind to and modify a target nucleic acid (e.g., in the case of a fusion polypeptide of the present disclosure). A target nucleic acid can be any nucleic acid (e.g., DNA, RNA), can be double stranded or single stranded, can be any type of nucleic acid (e.g., a chromosome (genomic DNA), derived from a chromosome, chromosomal DNA, plasmid, viral, extracellular, intracellular, mitochondrial, chloroplast, linear, circular, etc.) and can be from any organism (e.g., as long as the guide RNA comprises a nucleotide sequence that hybridizes to a target sequence in a target nucleic acid, such that the target nucleic acid can be targeted).

[0284] A target nucleic acid can be DNA or RNA. A target nucleic acid can be double stranded (e.g., dsDNA, dsRNA) or single stranded (e.g., ssRNA, ssDNA). In some cases, a target nucleic acid is single stranded. In some cases, a target nucleic acid is a single stranded RNA (ssRNA). In some cases, a target ssRNA (e.g., a target cell ssRNA, a viral ssRNA, etc.) is selected from: mRNA, rRNA, tRNA, non-coding RNA (ncRNA), long non-coding RNA (lncRNA), and microRNA (miRNA). In some cases, a target nucleic acid is a single stranded DNA (ssDNA) (e.g., a viral DNA). As noted above, in some cases, a target nucleic acid is single stranded.

[0285] A target nucleic acid can be located anywhere, for example, outside of a cell in vitro, inside of a cell in vitro, inside of a cell in vivo, inside of a cell ex vivo. Suitable target cells (which can comprise target nucleic acids such as genomic DNA) include, but are not limited to: a bacterial cell; an archaeal cell; a cell of a single-cell eukaryotic organism; a plant cell; an algal cell, e.g., Botryococcus braunii, Chlamydomonas reinhardtii, Nannochloropsis gaditana, Chlorella pyrenoidosa, Sargassum patens, C. agardh, and the like; a fungal cell (e.g., a yeast cell); an animal cell; a cell from an invertebrate animal (e.g. fruit fly, a cnidarian, an echinoderm, a nematode, etc.); a cell of an insect (e.g., a mosquito; a bee; an agricultural pest; etc.); a cell of an arachnid (e.g., a spider; a tick; etc.); a cell from a vertebrate animal (e.g., a fish, an amphibian, a reptile, a bird, a mammal); a cell from a mammal (e.g., a cell from a rodent; a cell from a human; a cell of a non-human mammal; a cell of a rodent (e.g., a mouse, a rat); a cell of a lagomorph (e.g., a rabbit); a cell of an ungulate (e.g., a cow, a horse, a camel, a llama, a vicuña, a sheep, a goat, etc.); a cell of a marine mammal (e.g., a whale, a seal, an elephant seal, a dolphin, a sea lion; etc.) and the like. Any type of cell may be of interest (e.g. a stem cell, e.g. an embryonic stem (ES) cell, an induced pluripotent stem (iPS) cell, a germ cell (e.g., an oocyte, a sperm, an oogonia, a spermatogonia, etc.), an adult stem cell, a somatic cell, e.g. a fibroblast, a hematopoietic cell, a neuron, a muscle cell, a bone cell, a hepatocyte, a pancreatic cell; an in vitro or in vivo embryonic cell of an embryo at any stage, e.g., a 1-cell, 2-cell, 4-cell, 8-cell, etc. stage zebrafish embryo; etc.).

[0286] Cells may be from established cell lines or they may be primary cells, where “primary cells”, “primary cell lines”, and “primary cultures” are used interchangeably herein to refer to cells and cells cultures that have been derived from a subject and allowed to grow in vitro for a limited number of passages, i.e. splittings, of the culture. For example, primary cultures are cultures that may have been passaged 0 times, 1 time, 2 times, 4 times, 5 times, 10 times, or 15 times, but not enough times go through the crisis stage. Typically, the primary cell lines are maintained for fewer than 10 passages in vitro. Target cells can be unicellular organisms and/or can be grown in culture. If the cells are primary cells, they may be harvest from an individual by any convenient method. For example, leukocytes may be conveniently harvested by apheresis, leukocytapheresis, density gradient separation, etc., while cells from tissues such as skin, muscle, bone marrow, spleen, liver, pancreas, lung, intestine, stomach, etc. can be conveniently harvested by biopsy.

[0287] In some of the above applications, the subject methods may be employed to induce target nucleic acid cleavage, target nucleic acid modification, and/or to bind target nucleic acids (e.g., for visualization, for collecting and/or analyzing, etc.) in mitotic or post-mitotic cells in vivo and/or ex vivo and/or in vitro (e.g., to disrupt production of a protein encoded by a targeted mRNA, to cleave or otherwise modify target DNA, to genetically modify a target cell, and the like). Because the guide RNA provides specificity by hybridizing to target nucleic acid, a mitotic and/or post-mitotic cell of interest in the disclosed methods may include a cell from any organism (e.g. a bacterial cell, an archaeal cell, a cell of a single-cell eukaryotic organism, a plant cell, an algal cell, e.g., Botryococcus braunii, Chlamydomonas reinhardtii, Nannochloropsis gaditana, Chlorella pyrenoidosa, Sargassum patens, C. agardh, and the like, a fungal cell (e.g., a yeast cell), an animal cell, a cell from an invertebrate animal (e.g. fruit fly, cnidarian, echinoderm, nematode, etc.), a cell from a vertebrate animal (e.g., fish, amphibian, reptile, bird, mammal), a cell from a mammal, a cell from a rodent, a cell from a human, etc.). In some cases, a subject RNA-guided effector protein (and/or nucleic acid encoding the protein such as DNA and/or RNA), and/or guide RNA (and/or a DNA encoding the guide RNA), and/or donor template, or a fusion polypeptide of the present disclosure (or a nucleic acid encoding the fusion polypeptide) and/or guide RNA, and/or RNP and/or system can be introduced into an individual (i.e., the target cell can be in vivo) (e.g., a mammal, a rat, a mouse, a pig, a primate, a non-human primate, a human, etc.). In some case, such an administration can be for the purpose of treating and/or preventing a disease, e.g., by editing the genome of targeted cells.

[0288] Plant cells include cells of a monocotyledon, and cells of a dicotyledon. The cells can be root cells, leaf cells, cells of the xylem, cells of the phloem, cells of the cambium, apical meristem cells, parenchyma cells, collenchyma cells, sclerenchyma cells, and the like. Plant cells include cells of agricultural crops such as wheat, corn, rice, sorghum, millet, soybean, etc. Plant cells include cells of agricultural fruit and nut plants, e.g., plant that produce apricots, oranges, lemons, apples, plums, pears, almonds, etc.

[0289] Additional examples of target cells are listed above in the section titled “Modified cells.” Non-limiting examples of cells (target cells) include: a prokaryotic cell, eukaryotic cell, a bacterial cell, an archaeal cell, a cell of a single-cell eukaryotic organism, a protozoa cell, a cell from a plant (e.g., cells from plant crops, fruits, vegetables, grains, soy bean, corn, maize, wheat, seeds, tomatoes, rice, cassava, sugarcane, pumpkin, hay, potatoes, cotton, cannabis, tobacco, flowering plants, conifers, gymnosperms, angiosperms, ferns, clubmosses, hornworts, liverworts, mosses, dicotyledons, monocotyledons, etc.), an algal cell, (e.g., Botryococcus braunii, Chlamydomonas reinhardtii, Nannochloropsis gaditana, Chlorella pyrenoidosa, Sargassum patens, C. agardh, and the like), seaweeds (e.g. kelp) a fungal cell (e.g., a yeast cell, a cell from a mushroom), an animal cell, a cell from an invertebrate animal (e.g., fruit fly, cnidarian, echinoderm, nematode, etc.), a cell from a vertebrate animal (e.g., fish, amphibian, reptile, bird, mammal), a cell from a mammal (e.g., an ungulate (e.g., a pig, a cow, a goat, a sheep); a rodent (e.g., a rat, a mouse); a non-human primate; a human; a feline (e.g., a cat); a canine (e.g., a dog); etc.), and the like. In some cases, the cell is a cell that does not originate from a natural organism (e.g., the cell can be a synthetically made cell; also referred to as an artificial cell).

[0290] A cell can be an in vitro cell (e.g., established cultured cell line). A cell can be an ex vivo cell (cultured cell from an individual). A cell can be an in vivo cell (e.g., a cell in an individual). A cell can be an isolated cell. A cell can be a cell inside of an organism. A cell can be an organism. A cell can be a cell in a cell culture (e.g., in vitro cell culture). A cell can be one of a collection of cells. A cell can be a prokaryotic cell or derived from a prokaryotic cell. A cell can be a bacterial cell or can be derived from a bacterial cell. A cell can be an archaeal cell or derived from an archaeal cell. A cell can be a eukaryotic cell or derived from a eukaryotic cell. A cell can be a plant cell or derived from a plant cell. A cell can be an animal cell or derived from an animal cell. A cell can be an invertebrate cell or derived from an invertebrate cell. A cell can be a vertebrate cell or derived from a vertebrate cell. A cell can be a mammalian cell or derived from a mammalian cell. A cell can be a rodent cell or derived from a rodent cell. A cell can be a human cell or derived from a human cell. A cell can be a microbe cell or derived from a microbe cell. A cell can be a fungi cell or derived from a fungi cell. A cell can be an insect cell. A cell can be an arthropod cell. A cell can be a protozoan cell. A cell can be a helminth cell.

[0291] Suitable cells include a stem cell (e.g. an embryonic stem (ES) cell, an induced pluripotent stem (iPS) cell; a germ cell (e.g., an oocyte, a sperm, an oogonia, a spermatogonia, etc.); a somatic cell, e.g. a fibroblast, an oligodendrocyte, a glial cell, a hematopoietic cell, a neuron, a muscle cell, a bone cell, a hepatocyte, a pancreatic cell, etc.

[0292] Suitable cells include human embryonic stem cells, fetal cardiomyocytes, myofibroblasts, mesenchymal stem cells, cardiomyocytes, adipocytes, totipotent cells, pluripotent cells, blood stem cells, myoblasts, adult stem cells, bone marrow cells, mesenchymal cells, embryonic stem cells, parenchymal cells, epithelial cells, endothelial cells, mesothelial cells, fibroblasts, osteoblasts, chondrocytes, exogenous cells, endogenous cells, stem cells, hematopoietic stem cells, bone-marrow derived progenitor cells, myocardial cells, skeletal cells, fetal cells, undifferentiated cells, multi-potent progenitor cells, unipotent progenitor cells, monocytes, cardiac myoblasts, skeletal myoblasts, macrophages, capillary endothelial cells, xenogenic cells, allogenic cells, and post-natal stem cells.

[0293] In some cases, the cell is an immune cell, a neuron, an epithelial cell, and endothelial cell, or a stem cell. In some cases, the immune cell is a T cell, a B cell, a monocyte, a natural killer cell, a dendritic cell, or a macrophage. In some cases, the immune cell is a cytotoxic T cell. In some cases, the immune cell is a helper T cell. In some cases, the immune cell is a regulatory T cell (Treg).

[0294] In some cases, the cell is a stem cell. Stem cells include adult stem cells. Adult stem cells are also referred to as somatic stem cells.

[0295] Adult stem cells are resident in differentiated tissue, but retain the properties of self-renewal and ability to give rise to multiple cell types, usually cell types typical of the tissue in which the stem cells are found. Numerous examples of somatic stem cells are known to those of skill in the art, including muscle stem cells; hematopoietic stem cells; epithelial stem cells; neural stem cells; mesenchymal stem cells; mammary stem cells; intestinal stem cells; mesodermal stem cells; endothelial stem cells; olfactory stem cells; neural crest stem cells; and the like.

[0296] Stem cells of interest include mammalian stem cells, where the term “mammalian” refers to any animal classified as a mammal, including humans; non-human primates; domestic and farm animals; and zoo, laboratory, sports, or pet animals, such as dogs, horses, cats, cows, mice, rats, rabbits, etc. In some cases, the stem cell is a human stem cell. In some cases, the stem cell is a rodent (e.g., a mouse; a rat) stem cell. In some cases, the stem cell is a non-human primate stem cell.

[0297] Stem cells can express one or more stem cell markers, e.g., SOX9, KRT19, KRT7, LGR5, CA9, FXYD2, CDH6, CLDN18, TSPAN8, BPIFB1, OLFM4, CDH17, and PPARGC1A.

[0298] In some embodiments, the stem cell is a hematopoietic stem cell (HSC). HSCs are mesoderm-derived cells that can be isolated from bone marrow, blood, cord blood, fetal liver and yolk sac. HSCs are characterized as CD34+ and CD3-. HSCs can repopulate the erythroid, neutrophil-macrophage, megakaryocyte and lymphoid hematopoietic cell lineages in vivo. In vitro, HSCs can be induced to undergo at least some self-renewing cell divisions and can be induced to differentiate to the same lineages as is seen in vivo. As such, HSCs can be induced to differentiate into one or more of erythroid cells, megakaryocytes, neutrophils, macrophages, and lymphoid cells.

[0299] In other embodiments, the stem cell is a neural stem cell (NSC). Neural stem cells (NSCs) are capable of differentiating into neurons, and glia (including oligodendrocytes, and astrocytes). A neural stem cell is a multipotent stem cell which is capable of multiple divisions, and under specific conditions can produce daughter cells which are neural stem cells, or neural progenitor cells that can be neuroblasts or glioblasts, e.g., cells committed to become one or more types of neurons and glial cells respectively. Methods of obtaining NSCs are known in the art.

[0300] In other embodiments, the stem cell is a mesenchymal stem cell (MSC). MSCs originally derived from the embryonal mesoderm and isolated from adult bone marrow, can differentiate to form muscle, bone, cartilage, fat, marrow stroma, and tendon. Methods of isolating MSC are known in the art; and any known method can be used to obtain MSC. See, e.g., U.S. Pat. No. 5,736,396, which describes isolation of human MSC.

[0301] A cell is in some cases a plant cell. A plant cell can be a cell of a monocotyledon. A cell can be a cell of a dicotyledon.

[0302] In some cases, the cell is a plant cell. For example, the cell can be a cell of a major agricultural plant, e.g., Barley, Beans (Dry Edible), Canola, Corn, Cotton (Pima), Cotton (Upland), Flaxseed, Hay (Alfalfa), Hay (Non-Alfalfa), Oats, Peanuts, Rice, Sorghum, Soybeans, Sugarbeets, Sugarcane, Sunflowers (Oil), Sunflowers (Non-Oil), Sweet Potatoes, Tobacco (Burley), Tobacco (Flue-cured), Tomatoes, Wheat (Durum), Wheat (Spring), Wheat (Winter), and the like. As another example, the cell is a cell of a vegetable crops which include but are not limited to, e.g., alfalfa sprouts, aloe leaves, arrow root, arrowhead, artichokes, asparagus, bamboo shoots, banana flowers, bean sprouts, beans, beet tops, beets, bittermelon, bok choy, broccoli, broccoli rabe (rappini), brussels sprouts, cabbage, cabbage sprouts, cactus leaf (nopales), calabaza, cardoon, carrots, cauliflower, celery, chayote, chinese artichoke (crosnes), chinese cabbage, chinese celery, chinese chives, choy sum, chrysanthemum leaves (tung ho), collard greens, corn stalks, corn-sweet, cucumbers, daikon, dandelion greens, dasheen, dau mue (pea tips), donqua (winter melon), eggplant, endive, escarole, fiddle head ferns, field cress, frisee, gai choy (chinese mustard), gailon, galanga (siam, thai ginger), garlic, ginger root, gobo, greens, hanover salad greens, huauzontle, jerusalem artichokes, jicama, kale greens, kohlrabi, lamb's quarters (quilete), lettuce (bibb), lettuce (boston), lettuce (boston red), lettuce (green leaf), lettuce (iceberg), lettuce (lolla rossa), lettuce (oak leaf—green), lettuce (oak leaf—red), lettuce (processed), lettuce (red leaf), lettuce (romaine), lettuce (ruby romaine), lettuce (russian red mustard), linkok, lo bok, long beans, lotus root, mache, maguey (agave) leaves, malanga, mesculin mix, mizuna, moap (smooth luffa), moo, moqua (fuzzy squash), mushrooms, mustard, nagaimo, okra, ong choy, onions green, opo (long squash), ornamental corn, ornamental gourds, parsley, parsnips, peas, peppers (bell type), peppers, pumpkins, radicchio, radish sprouts, radishes, rape greens, rape greens, rhubarb, romaine (baby red), rutabagas, salicornia (sea bean), sinqua (angled/ridged luffa), spinach, squash, straw bales, sugarcane, sweet potatoes, swiss chard, tamarindo, taro, taro leaf, taro shoots, tatsoi, tepeguaje (guaje), tindora, tomatillos, tomatoes, tomatoes (cherry), tomatoes (grape type), tomatoes (plum type), tumeric, turnip tops greens, turnips, water chestnuts, yampi, yams (names), yu choy, yuca (cassava), and the like.

[0303] A cell is in some cases an arthropod cell. For example, the cell can be a cell of a sub-order, a family, a sub-family, a group, a sub-group, or a species of, e.g., Chelicerata, Myriapodia, Hexipodia, Arachnida, Insecta, Archaeognatha, Thysanura, Palaeoptera, Ephemeroptera, Odonata, Anisoptera, Zygoptera, Neoptera, Exopterygota, Plecoptera, Embioptera, Orthoptera, Zoraptera, Dermaptera, Dictyoptera, Notoptera, Grylloblattidae, Mantophasmatidae, Phasmatodea, Blattaria, Isoptera, Mantodea, Parapneuroptera, Psocoptera, Thysanoptera, Phthiraptera, Hemiptera, Endopterygota or Holometabola, Hymenoptera, Coleoptera, Strepsiptera, Raphidioptera, Megaloptera, Neuroptera, Mecoptera, Siphonaptera, Diptera, Trichoptera, or Lepidoptera.

[0304] A cell is in some cases an insect cell. For example, in some cases, the cell is a cell of a mosquito, a grasshopper, a true bug, a fly, a flea, a bee, a wasp, an ant, a louse, a moth, or a beetle.

Introducing Components into a Target Cell

[0305] A Cas9 guide RNA (or a nucleic acid comprising a nucleotide sequence encoding same), and/or a Cas9 fusion polypeptide (or a nucleic acid comprising a nucleotide sequence encoding same) and/or a donor polynucleotide can be introduced into a host cell by any of a variety of well-known methods.

[0306] Methods of introducing a nucleic acid into a cell are known in the art, and any convenient method can be used to introduce a nucleic acid (e.g., an expression construct) into a target cell (e.g., eukaryotic cell, human cell, stem cell, progenitor cell, and the like). Suitable methods are described in more detail elsewhere herein and include e.g., viral or bacteriophage infection, transfection, conjugation, protoplast fusion, lipofection, electroporation, calcium phosphate precipitation, polyethyleneimine (PEI)-mediated transfection, DEAE-dextran mediated transfection, liposome-mediated transfection, particle gun technology, calcium phosphate precipitation, direct micro injection, nanoparticle-mediated nucleic acid delivery (see, e.g., Panyam et., al Adv Drug Deliv Rev. 2012 Sep. 13. pii: 50169-409X(12)00283-9. doi: 10.1016/j.addr.2012.09.023), and the like. Any or all of the components can be introduced into a cell as a composition (e.g., including any convenient combination of: an RNA-guided effector polypeptide, a fusion polypeptide, a guide RNA, a donor polynucleotide, etc.) using known methods, e.g., such as nucleofection.

### Donor Polynucleotide (Donor Template)

[0307] Guided by a dual or single guide RNA, a fusion protein in some cases generates site-specific double strand breaks (DSBs) or single strand breaks (SSBs) within double-stranded DNA (dsDNA) target nucleic acids, which are repaired either by non-homologous end joining (NHEJ) or homology-directed recombination (HDR).

[0308] In some cases, contacting a target DNA (with fusion protein and a guide RNA) occurs under conditions that are permissive for nonhomologous end joining or homology-directed repair. Thus, in some cases, a subject method includes contacting the target DNA with a donor polynucleotide (e.g., by introducing the donor polynucleotide into a cell), wherein the donor polynucleotide, a portion of the donor polynucleotide, a copy of the donor polynucleotide, or a portion of a copy of the donor polynucleotide integrates into the target DNA. In some cases, the method does not comprise contacting a cell with a donor polynucleotide, and the target DNA is modified such that nucleotides within the target DNA are deleted.

[0309] In applications in which it is desirable to insert a polynucleotide sequence into the genome where a target sequence is cleaved, a donor polynucleotide (a nucleic acid comprising a donor sequence) can also be provided to the cell. By a “donor sequence” or “donor polynucleotide” or “donor template” it is meant a nucleic acid sequence to be inserted at the site cleaved by the fusion protein (e.g., after dsDNA cleavage, after nicking a target DNA, after dual nicking a target DNA, and the like). The donor polynucleotide can contain sufficient homology to a genomic sequence at the target site, e.g. 70%, 80%, 85%, 90%, 95%, or 100% homology with the nucleotide sequences flanking the target site, e.g. within about 50 bases or less of the target site, e.g. within about 30 bases, within about 15 bases, within about 10 bases, within about 5 bases, or immediately flanking the target site, to support homology-directed repair between it and the genomic sequence to which it bears homology. Approximately 25, 50, 100, or 200 nucleotides, or more than 200 nucleotides, of sequence homology between a donor and a genomic sequence (or any integral value between 10 and 200 nucleotides, or more) can support homology-directed repair. Donor polynucleotides can be of any length, e.g. 10 nucleotides or more, 50 nucleotides or more, 100 nucleotides or more, 250 nucleotides or more, 500 nucleotides or more, 1000 nucleotides or more, 5000 nucleotides or more, etc.

[0310] The donor sequence is typically not identical to the genomic sequence that it replaces. Rather, the donor sequence may contain at least one or more single base changes, insertions, deletions, inversions or rearrangements with respect to the genomic sequence, so long as sufficient homology is present to support homology-directed repair (e.g., for gene correction, e.g., to convert a disease-causing base pair of a non disease-causing base pair). In some embodiments, the donor sequence comprises a non-homologous sequence flanked by two regions of homology, such that homology-directed repair between the target DNA region and the two flanking sequences results in insertion of the non-homologous sequence at the target region. Donor sequences may also comprise a vector backbone containing sequences that are not homologous to the DNA region of interest and that are not intended for insertion into the DNA region of interest. Generally, the homologous region(s) of a donor sequence will have at least 50% sequence identity to a genomic sequence with which recombination is desired. In certain embodiments, 60%, 70%, 80%, 90%, 95%, 98%, 99%, or 99.9% sequence identity is present. Any value between 1% and 100% sequence identity can be present, depending upon the length of the donor polynucleotide.

[0311] The donor sequence may comprise certain sequence differences as compared to the genomic sequence, e.g. restriction sites, nucleotide polymorphisms, selectable markers (e.g., drug resistance genes, fluorescent proteins, enzymes etc.), etc., which may be used to assess for successful insertion of the donor sequence at the cleavage site or in some cases may be used for other purposes (e.g., to signify expression at the targeted genomic locus). In some cases, if located in a coding region, such nucleotide sequence differences will not change the amino acid sequence, or will make silent amino acid changes (i.e., changes which do not affect the structure or function of the protein). Alternatively, these sequences differences may include flanking recombination sequences such as FLPs, loxP sequences, or the like, that can be activated at a later time for removal of the marker sequence.

[0312] In some cases, the donor sequence is provided to the cell as single-stranded DNA. In some cases, the donor sequence is provided to the cell as double-stranded DNA. It may be introduced into a cell in linear or circular form. If introduced in linear form, the ends of the donor sequence may be protected (e.g., from exonucleolytic degradation) by any convenient method and such methods are known to those of skill in the art. For example, one or more dideoxynucleotide residues can be added to the 3′ terminus of a linear molecule and/or self-complementary oligonucleotides can be ligated to one or both ends. See, for example, Chang et al. (1987) Proc. Natl. Acad Sci USA 84:4959-4963; Nehls et al. (1996) Science 272:886-889. Additional methods for protecting exogenous polynucleotides from degradation include, but are not limited to, addition of terminal amino group(s) and the use of modified internucleotide linkages such as, for example, phosphorothioates, phosphoramidates, and O-methyl ribose or deoxyribose residues. As an alternative to protecting the termini of a linear donor sequence, additional lengths of sequence may be included outside of the regions of homology that can be degraded without impacting recombination. A donor sequence can be introduced into a cell as part of a vector molecule having additional sequences such as, for example, replication origins, promoters and genes encoding antibiotic resistance. Moreover, donor sequences can be introduced as naked nucleic acid, as nucleic acid complexed with an agent such as a liposome or poloxamer, or can be delivered by viruses (e.g., adenovirus, AAV), as described elsewhere herein for nucleic acids encoding a guide RNA and/or a fusion polypeptide and/or donor polynucleotide.

### Transgenic, Non-Human Organisms

[0313] As described above, in some cases, a nucleic acid (e.g., a recombinant expression vector) of the present disclosure (e.g., a nucleic acid comprising a nucleotide sequence encoding an RNA-guided effector polypeptide of the present disclosure; a nucleic acid comprising a nucleotide sequence encoding a fusion polypeptide of the present disclosure; etc.), is used as a transgene to generate a transgenic non-human organism that produces an RNA-guided effector polypeptide, or a fusion polypeptide, of the present disclosure. The present disclosure provides a transgenic-non-human organism comprising a nucleotide sequence encoding an RNA-guided effector polypeptide, or a fusion polypeptide, of the present disclosure.

### Transgenic, Non-Human Animals

[0314] The present disclosure provides a transgenic non-human animal, which animal comprises a transgene comprising a nucleic acid comprising a nucleotide sequence encoding an RNA-guided effector polypeptide or a fusion polypeptide. In some embodiments, the genome of the transgenic non-human animal comprises a nucleotide sequence encoding an RNA-guided effector polypeptide, or a fusion polypeptide, of the present disclosure. In some cases, the transgenic non-human animal is homozygous for the genetic modification. In some cases, the transgenic non-human animal is heterozygous for the genetic modification. In some embodiments, the transgenic non-human animal is a vertebrate, for example, a fish (e.g., salmon, trout, zebra fish, gold fish, puffer fish, cave fish, etc.), an amphibian (frog, newt, salamander, etc.), a bird (e.g., chicken, turkey, etc.), a reptile (e.g., snake, lizard, etc.), a non-human mammal (e.g., an ungulate, e.g., a pig, a cow, a goat, a sheep, etc.; a lagomorph (e.g., a rabbit); a rodent (e.g., a rat, a mouse); a non-human primate; etc.), etc. In some cases, the transgenic non-human animal is an invertebrate. In some cases, the transgenic non-human animal is an insect (e.g., a mosquito; an agricultural pest; etc.). In some cases, the transgenic non-human animal is an arachnid.

[0315] Nucleotide sequences encoding an RNA-guided effector polypeptide, or a fusion polypeptide, of the present disclosure can be under the control of (i.e., operably linked to) an unknown promoter (e.g., when the nucleic acid randomly integrates into a host cell genome) or can be under the control of (i.e., operably linked to) a known promoter. Suitable known promoters can be any known promoter and include constitutively active promoters (e.g., CMV promoter), inducible promoters (e.g., heat shock promoter, tetracycline-regulated promoter, steroid-regulated promoter, metal-regulated promoter, estrogen receptor-regulated promoter, etc.), spatially restricted and/or temporally restricted promoters (e.g., a tissue specific promoter, a cell type specific promoter, etc.), etc.

### Transgenic Plants

[0316] As described above, in some cases, a nucleic acid (e.g., a recombinant expression vector) of the present disclosure (e.g., a nucleic acid comprising a nucleotide sequence encoding an RNA-guided effector polypeptide of the present disclosure; a nucleic acid comprising a nucleotide sequence encoding a fusion polypeptide of the present disclosure; etc.), is used as a transgene to generate a transgenic plant that produces an RNA-guided effector polypeptide, or a fusion polypeptide, of the present disclosure. The present disclosure provides a transgenic plant comprising a nucleotide sequence encoding an RNA-guided effector polypeptide, or a fusion polypeptide, of the present disclosure. In some embodiments, the genome of the transgenic plant comprises a subject nucleic acid. In some embodiments, the transgenic plant is homozygous for the genetic modification. In some embodiments, the transgenic plant is heterozygous for the genetic modification.

[0317] Methods of introducing exogenous nucleic acids into plant cells are well known in the art. Such plant cells are considered “transformed,” as defined above. Suitable methods include viral infection (such as double stranded DNA viruses), transfection, conjugation, protoplast fusion, electroporation, particle gun technology, calcium phosphate precipitation, direct microinjection, silicon carbide whiskers technology, Agrobacterium-mediated transformation and the like. The choice of method is generally dependent on the type of cell being transformed and the circumstances under which the transformation is taking place (i.e. in vitro, ex vivo, or in vivo).

[0318] Transformation methods based upon the soil bacterium Agrobacterium tumefaciens are particularly useful for introducing an exogenous nucleic acid molecule into a vascular plant. The wild type form of Agrobacterium contains a Ti (tumor-inducing) plasmid that directs production of tumorigenic crown gall growth on host plants. Transfer of the tumor-inducing T-DNA region of the Ti plasmid to a plant genome requires the Ti plasmid-encoded virulence genes as well as T-DNA borders, which are a set of direct DNA repeats that delineate the region to be transferred. An Agrobacterium-based vector is a modified form of a Ti plasmid, in which the tumor inducing functions are replaced by the nucleic acid sequence of interest to be introduced into the plant host.

[0319] Agrobacterium-mediated transformation generally employs cointegrate vectors or binary vector systems, in which the components of the Ti plasmid are divided between a helper vector, which resides permanently in the Agrobacterium host and carries the virulence genes, and a shuttle vector, which contains the gene of interest bounded by T-DNA sequences. A variety of binary vectors is well known in the art and are commercially available, for example, from Clontech (Palo Alto, Calif.). Methods of coculturing Agrobacterium with cultured plant cells or wounded tissue such as leaf tissue, root explants, hypocotyledons, stem pieces or tubers, for example, also are well known in the art. See, e.g., Glick and Thompson, (eds.), Methods in Plant Molecular Biology and Biotechnology, Boca Raton, Fla.: CRC Press (1993).

[0320] Microprojectile-mediated transformation also can be used to produce a subject transgenic plant. This method, first described by Klein et al. (Nature 327:70-73 (1987)), relies on microprojectiles such as gold or tungsten that are coated with the desired nucleic acid molecule by precipitation with calcium chloride, spermidine or polyethylene glycol. The microprojectile particles are accelerated at high speed into an angiosperm tissue using a device such as the BIOLISTIC PD-1000 (Biorad; Hercules Calif.).

[0321] A nucleic acid of the present disclosure (e.g., a nucleic acid (e.g., a recombinant expression vector) comprising a nucleotide sequence encoding an RNA-guided effector polypeptide, or a fusion polypeptide, of the present disclosure) may be introduced into a plant in a manner such that the nucleic acid is able to enter a plant cell(s), e.g., via an in vivo or ex vivo protocol. By “in vivo,” it is meant in the nucleic acid is administered to a living body of a plant e.g. infiltration. By “ex vivo” it is meant that cells or explants are modified outside of the plant, and then such cells or organs are regenerated to a plant. A number of vectors suitable for stable transformation of plant cells or for the establishment of transgenic plants have been described, including those described in Weissbach and Weissbach, (1989) Methods for Plant Molecular Biology Academic Press, and Gelvin et al., (1990) Plant Molecular Biology Manual, Kluwer Academic Publishers. Specific examples include those derived from a Ti plasmid of Agrobacterium tumefaciens, as well as those disclosed by Herrera-Estrella et al. (1983) Nature 303: 209, Bevan (1984) Nucl Acid Res. 12: 8711-8721, Klee (1985) Bio/Technolo 3: 637-642. Alternatively, non-Ti vectors can be used to transfer the DNA into plants and cells by using free DNA delivery techniques. By using these methods transgenic plants such as wheat, rice (Christou (1991) Bio/Technology 9:957-9 and 4462) and corn (Gordon-Kamm (1990) Plant Cell 2: 603-618) can be produced. An immature embryo can also be a good target tissue for monocots for direct DNA delivery techniques by using the particle gun (Weeks et al. (1993) Plant Physiol 102: 1077-1084; Vasil (1993) Bio/Technolo 10: 667-674; Wan and Lemeaux (1994) Plant Physiol 104: 37-48 and for Agrobacterium-mediated DNA transfer (Ishida et al. (1996) Nature Biotech 14: 745-750). Exemplary methods for introduction of DNA into chloroplasts are biolistic bombardment, polyethylene glycol transformation of protoplasts, and microinjection (Danieli et al Nat. Biotechnol 16:345-348, 1998; Staub et al Nat. Biotechnol 18: 333-338, 2000; O'Neill et al Plant J. 3:729-738, 1993; Knoblauch et al Nat. Biotechnol 17: 906-909; U.S. Pat. Nos. 5,451,513, 5,545,817, 5,545,818, and 5,576,198; in Intl. Application No. WO 95/16783; and in Boynton et al., Methods in Enzymology 217: 510-536 (1993), Svab et al., Proc. Natl. Acad. Sci. USA 90: 913-917 (1993), and McBride et al., Proc. Natl. Acad. Sci. USA 91: 7301-7305 (1994)). Any vector suitable for the methods of biolistic bombardment, polyethylene glycol transformation of protoplasts and microinjection will be suitable as a targeting vector for chloroplast transformation. Any double stranded DNA vector may be used as a transformation vector, especially when the method of introduction does not utilize Agrobacterium.

[0322] Plants which can be genetically modified include grains, forage crops, fruits, vegetables, oil seed crops, palms, forestry, and vines. Specific examples of plants which can be modified follow: maize, banana, peanut, field peas, sunflower, tomato, canola, tobacco, wheat, barley, oats, potato, soybeans, cotton, carnations, sorghum, lupin and rice.

[0323] The present disclosure provides transformed plant cells, tissues, plants and products that contain the transformed plant cells. A feature of the subject transformed cells, and tissues and products that include the same is the presence of a subject nucleic acid integrated into the genome, and production by plant cells of an RNA-guided effector polypeptide, or a fusion polypeptide, of the present disclosure. Recombinant plant cells of the present invention are useful as populations of recombinant cells, or as a tissue, seed, whole plant, stem, fruit, leaf, root, flower, stem, tuber, grain, animal feed, a field of plants, and the like.

[0324] Nucleotide sequences encoding an RNA-guided effector polypeptide, or a fusion polypeptide, of the present disclosure can be under the control of (i.e., operably linked to) an unknown promoter (e.g., when the nucleic acid randomly integrates into a host cell genome) or can be under the control of (i.e., operably linked to) a known promoter. Suitable known promoters can be any known promoter and include constitutively active promoters, inducible promoters, spatially restricted and/or temporally restricted promoters, etc.

### Compositions, Ribonucleoprotein Complexes, and Systems

[0325] The present disclosure provides a ribonucleoprotein (RNP) complex comprising: a) a fusion polypeptide of the present disclosure; and b) a guide RNA, or a nucleic acid encoding the guide RNA, wherein the guide RNA comprises a guide sequence that is complementary to a target sequence of a target nucleic acid, and comprises a region that can bind to the RNA-guided effector polypeptide component of the fusion polypeptide. The present disclosure provides an RNP complex comprising: a) an RNA-guided effector polypeptide of the present disclosure; and b) a guide RNA, or a nucleic acid encoding the guide RNA, wherein the guide RNA comprises a guide sequence that is complementary to a target sequence of a target nucleic acid, and comprises a region that can bind to the RNA-guided effector polypeptide. In some cases, the guide RNA is a single-molecule guide RNA.

[0326] The present disclosure provides a composition comprising: a) an RNP complex of the present disclosure; and b) at least one additional component, where the at least one additional component is selected from a salt, a buffer, a protease inhibitor, a nuclease inhibitor, a lipid, and the like. The present disclosure provides a composition comprising: a) an RNP complex of the present disclosure; and b) a pharmaceutically acceptable excipient. In some cases, a composition of the present disclosure comprises a lipid. In some cases, a composition of the present disclosure comprises a liposome, a hydrogel, a microparticle, a nanoparticle, or a block copolymer micelle.

[0327] The present disclosure provides a system comprising an RNA-guided effector polypeptide of the present disclosure, or a fusion polypeptide of the present disclosure. The present disclosure provides a system comprising a nucleic acid comprising a nucleotide sequence encoding an RNA-guided effector polypeptide of the present disclosure, or a nucleic acid comprising a nucleotide sequence encoding a fusion polypeptide of the present disclosure. In some cases, a system of the present disclosure further comprises a guide RNA.

[0328] A system of the present disclosure can comprise: a) an RNA-guided effector polypeptide of the present disclosure and a guide RNA; b) a fusion polypeptide of the present disclosure and a guide RNA; c) a fusion polypeptide of the present disclosure, a guide RNA, and a donor template nucleic acid; d) an mRNA encoding an RNA-guided effector polypeptide of the present disclosure; and a guide RNA; e) an mRNA encoding a fusion polypeptide of the present disclosure; and a guide RNA; f) an mRNA encoding a fusion polypeptide of the present disclosure, a guide RNA, and a donor template nucleic acid; g) a recombinant expression vector comprising a nucleotide sequence encoding an RNA-guided effector polypeptide of the present disclosure and a nucleotide sequence encoding a guide RNA; h) a recombinant expression vector comprising a nucleotide sequence encoding a fusion polypeptide of the present disclosure and a nucleotide sequence encoding a guide RNA; i) a recombinant expression vector comprising a nucleotide sequence encoding a fusion polypeptide of the present disclosure, a nucleotide sequence encoding a guide RNA, and a nucleotide sequence encoding a donor template nucleic acid; j) a first recombinant expression vector comprising a nucleotide sequence encoding an RNA-guided effector polypeptide of the present disclosure, and a second recombinant expression vector comprising a nucleotide sequence encoding a guide RNA; k) a first recombinant expression vector comprising a nucleotide sequence encoding a fusion polypeptide of the present disclosure, and a second recombinant expression vector comprising a nucleotide sequence encoding a guide RNA; l) a first recombinant expression vector comprising a nucleotide sequence encoding a fusion polypeptide of the present disclosure, and a second recombinant expression vector comprising a nucleotide sequence encoding a guide RNA; and a donor template nucleic acid; m) a recombinant expression vector comprising a nucleotide sequence encoding an RNA-guided effector polypeptide of the present disclosure, a nucleotide sequence encoding a first guide RNA, and a nucleotide sequence encoding a second guide RNA; or n) a recombinant expression vector comprising a nucleotide sequence encoding a fusion polypeptide of the present disclosure, a nucleotide sequence encoding a first guide RNA, and a nucleotide sequence encoding a second guide RNA; or some variation of one of (a) through (n).

### Examples of Non-Limiting Aspects of the Disclosure

[0329] Aspects, including embodiments, of the present subject matter described above may be beneficial alone or in combination, with one or more other aspects or embodiments. Without limiting the foregoing description, certain non-limiting aspects of the disclosure numbered 1-77 are provided below. As will be apparent to those of skill in the art upon reading this disclosure, each of the individually numbered aspects may be used or combined with any of the preceding or following individually numbered aspects. This is intended to provide support for all such combinations of aspects and is not limited to combinations of aspects explicitly provided below:

[0330] Aspect 1. An RNA-guided effector polypeptide having a length of from about 610 amino acids to about 1310 amino acids, wherein the RNA-guided effector polypeptide comprises one or more of:

[0331] i) a deletion of from 5 contiguous amino acids to 158 contiguous amino acids of amino acids 166-324;

[0332] ii) a deletion of from 30 contiguous amino acids to 255 contiguous amino acids of amino acids 484-739;

[0333] iii) a deletion of from 4 contiguous amino acids to 220 contiguous amino acids of amino acids 761-981; and

[0334] d) a deletion of from 20 contiguous amino acids to 118 contiguous amino acids of amino acids 994-1112,

[0335] wherein the amino acid numbering is based on SEQ ID NO:5, or corresponding amino acid positions of an amino acid sequence set forth in any one of SEQ ID NOs:6-816.

[0336] Aspect 2. The RNA-guided effector polypeptide of aspect 1, wherein the RNA-guided effector polypeptide comprises a deletion of from 5 contiguous amino acids to 158 contiguous amino acids of amino acids 166-324.

[0337] Aspect 3. The RNA-guided effector polypeptide of aspect 1, wherein the RNA-guided effector polypeptide comprises a deletion of from 30 contiguous amino acids to 255 contiguous amino acids of amino acids 484-739.

[0338] Aspect 4. The RNA-guided effector polypeptide of aspect 1, wherein the RNA-guided effector polypeptide comprises a deletion of from 4 contiguous amino acids to 220 contiguous amino acids of amino acids 761-981.

[0339] Aspect 5. The RNA-guided effector polypeptide of aspect 1, wherein the RNA-guided effector polypeptide comprises a deletion of from 20 contiguous amino acids to 118 contiguous amino acids of amino acids 994-1112.

[0340] Aspect 6. The RNA-guided effector polypeptide of aspect 1, wherein the RNA-guided effector polypeptide comprises:

[0341] i) a deletion of from 5 contiguous amino acids to 158 contiguous amino acids of amino acids 166-324; and

[0342] ii) a deletion of from 30 contiguous amino acids to 255 contiguous amino acids of amino acids 484-739.

[0343] Aspect 7. The RNA-guided effector polypeptide of aspect 1, wherein the RNA-guided effector polypeptide comprises:

[0344] i) a deletion of from 5 contiguous amino acids to 158 contiguous amino acids of amino acids 166-324; and

[0345] ii) a deletion of from 4 contiguous amino acids to 220 contiguous amino acids of amino acids 761-981.

[0346] Aspect 8. The RNA-guided effector polypeptide of aspect 1, wherein the RNA-guided effector polypeptide comprises:

[0347] i) a deletion of from 5 amino acids to 158 amino acids of amino acids 166-324; and

[0348] ii) a deletion of from 20 amino acids to 118 amino acids of amino acids 994-1112.

[0349] Aspect 9. The RNA-guided effector polypeptide of aspect 1, wherein the RNA-guided effector polypeptide comprises:

[0350] i) a deletion of from 5 contiguous amino acids to 158 contiguous amino acids of amino acids 166-324;

[0351] ii) a deletion of from 30 contiguous amino acids to 255 contiguous amino acids of amino acids 484-739; and

[0352] iii) a deletion of from 4 contiguous amino acids to 220 contiguous amino acids of amino acids 761-981.

[0353] Aspect 10. The RNA-guided effector polypeptide of aspect 1, wherein the RNA-guided effector polypeptide comprises:

[0354] i) a deletion of from 5 contiguous amino acids to 158 contiguous amino acids of amino acids 166-324;

[0355] ii) a deletion of from 4 contiguous amino acids to 220 contiguous amino acids of amino acids 761-981; and

[0356] iii) a deletion of from 20 contiguous amino acids to 118 contiguous amino acids of amino acids 994-1112.

[0357] Aspect 11. The RNA-guided effector polypeptide of aspect 1, wherein the RNA-guided effector polypeptide comprises:

[0358] i) a deletion of from 5 contiguous amino acids to 158 contiguous amino acids of amino acids 166-324;

[0359] ii) a deletion of from 30 contiguous amino acids to 255 contiguous amino acids of amino acids 484-739;

[0360] iii) a deletion of from 4 contiguous amino acids to 220 contiguous amino acids of amino acids 761-981; and

[0361] iv) a deletion of from 20 contiguous amino acids to 118 contiguous amino acids of amino acids 994-1112.

[0362] Aspect 12. The RNA-guided effector polypeptide of aspect 1, wherein the RNA-guided effector polypeptide comprises:

[0363] i) a deletion of from 30 contiguous amino acids to 255 contiguous amino acids of amino acids 484-739; and

[0364] ii) a deletion of from 4 contiguous amino acids to 220 contiguous amino acids of amino acids 761-981.

[0365] Aspect 13. The RNA-guided effector polypeptide of aspect 1, wherein the RNA-guided effector polypeptide comprises:

[0366] i) a deletion of from 30 contiguous amino acids to 255 contiguous amino acids of amino acids 484-739; and

[0367] ii) a deletion of from 20 contiguous amino acids to 118 contiguous amino acids of amino acids 994-1112.

[0368] Aspect 14. The RNA-guided effector polypeptide of aspect 1, wherein the RNA-guided effector polypeptide comprises:

[0369] i) a deletion of from 30 contiguous amino acids to 255 contiguous amino acids of amino acids 484-739;

[0370] ii) a deletion of from 4 contiguous amino acids to 220 contiguous amino acids of amino acids 761-981; and

[0371] iii) a deletion of from 20 contiguous amino acids to 118 contiguous amino acids of amino acids 994-1112.

[0372] Aspect 15. The RNA-guided effector polypeptide of aspect 1, wherein the RNA-guided effector polypeptide comprises:

[0373] i) a deletion of from 4 contiguous amino acids to 220 contiguous amino acids of amino acids 761-981; and

[0374] ii) a deletion of from 20 contiguous amino acids to 118 contiguous amino acids of amino acids 994-1112.

[0375] Aspect 16. The RNA-guided effector polypeptide of aspect 1, wherein the RNA-guided effector polypeptide comprises a deletion of amino acids 179-296 based on the number of SEQ ID NO:5.

[0376] Aspect 17. The RNA-guided effector polypeptide of aspect 1, wherein the RNA-guided effector polypeptide comprises a deletion of amino acids 503-708 based on the number of SEQ ID NO:5.

[0377] Aspect 18. The RNA-guided effector polypeptide of aspect 1, wherein the RNA-guided effector polypeptide comprises a deletion of amino acids 792-897 based on the number of SEQ ID NO:5.

[0378] Aspect 19. The RNA-guided effector polypeptide of aspect 1, wherein the RNA-guided effector polypeptide comprises a deletion of amino acids 1010-1081 based on the number of SEQ ID NO:5.

[0379] Aspect 20. The RNA-guided effector polypeptide of aspect 1, wherein the RNA-guided effector polypeptide comprises:

[0380] i) a deletion of amino acids 503-708 based on the number of SEQ ID NO:5;

[0381] ii) a deletion of amino acids 792-897 based on the number of SEQ ID NO:5; and

[0382] iii) a deletion of amino acids 1010-1081 based on the number of SEQ ID NO:5.

[0383] Aspect 21. The RNA-guided effector polypeptide of aspect 1, wherein the RNA-guided effector polypeptide comprises:

[0384] i) a deletion of amino acids 179-296 based on the number of SEQ ID NO:5;

[0385] ii) a deletion of amino acids 503-708 based on the number of SEQ ID NO:5;

[0386] iii) a deletion of amino acids 792-897 based on the number of SEQ ID NO:5; and

[0387] iv) a deletion of amino acids 1010-1081 based on the number of SEQ ID NO:5.

[0388] Aspect 22. The RNA-guided effector polypeptide of aspect 1, wherein the polypeptide comprises an amino acid sequence having at least 85% amino acid sequence identity to the amino acid sequence depicted in FIG. 2, wherein the RNA-guided effector polypeptide is 990 amino acids in length.

[0389] Aspect 23. The RNA-guided effector polypeptide of aspect 1, wherein the polypeptide comprises an amino acid sequence having at least 85% amino acid sequence identity to the amino acid sequence depicted in FIG. 3, wherein the RNA-guided effector polypeptide is 874 amino acids in length.

[0390] Aspect 24. A nucleic acid comprising a nucleotide sequence encoding the RNA-guided effector polypeptide of any one of aspects 1-23.

[0391] Aspect 25. The nucleic acid of aspect 24, wherein the nucleotide sequence is operably linked to a transcriptional control element.

[0392] Aspect 26. The nucleic acid of aspect 25, wherein the transcriptional control element is a promoter.

[0393] Aspect 27. The nucleic acid of aspect 26, wherein the promoter is a regulatable promoter.

[0394] Aspect 28. The nucleic acid of aspect 27, wherein the promoter is functional in a eukaryotic cell.

[0395] Aspect 29. The nucleic acid of any one of aspects 24-28, further comprising a nucleotide sequence encoding a guide RNA, wherein the guide RNA comprises a guide sequence that is complementary to a target sequence of a target nucleic acid, and comprises a region that can bind to the RNA-guided effector polypeptide.

[0396] Aspect 30. A recombinant expression vector comprising the nucleic acid of any one of aspects 24-29.

[0397] Aspect 31. The recombinant expression vector of aspect 30, wherein the recombinant expression vector is recombinant viral expression vector.

[0398] Aspect 32. A fusion polypeptide comprising:

[0399] a) the RNA-guided effector polypeptide of any one of aspects 1-23; and

[0400] b) a heterologous fusion partner.

[0401] Aspect 33. The fusion polypeptide of aspect 32, wherein the heterologous fusion partner provides for control of gene expression.

[0402] Aspect 34. The fusion polypeptide of aspect 32, wherein the heterologous fusion partner is a protein-modifying enzyme.

[0403] Aspect 35. The fusion polypeptide of aspect 32, wherein the heterologous fusion partner is a modifying enzyme is a DNA-modifying enzyme.

[0404] Aspect 36. The fusion polypeptide of aspect 32, wherein the heterologous fusion partner exhibits nuclease activity.

[0405] Aspect 37. The fusion polypeptide of aspect 36, wherein the nuclease activity is double-stranded DNA cleavage activity.

[0406] Aspect 38. The fusion polypeptide of aspect 37, wherein the heterologous fusion partner comprises an amino acid sequence having at least 85% amino acid sequence identity to the catalytic domain of the amino acid sequence depicted in FIG. 2A and has a length of no more than 200 amino acids.

[0407] Aspect 39. The fusion polypeptide of any one of aspects 32-38, wherein the fusion partner has a length of no more than 400 amino acids.

[0408] Aspect 40. The fusion polypeptide of aspect 35, wherein the heterologous fusion partner is a base editor.

[0409] Aspect 41. The fusion polypeptide of aspect 40, wherein the base editor is a cytidine deaminase.

[0410] Aspect 42. The fusion polypeptide of aspect 40, wherein the base editor is an adenosine deaminase.

[0411] Aspect 43. The fusion polypeptide of any one of aspects 32-42, further comprising one or more nuclear localization sequences (NLS).

[0412] Aspect 44. The fusion polypeptide of aspect 43, wherein the fusion polypeptide comprises a single NLS.

[0413] Aspect 45. The fusion polypeptide of aspect 43, wherein the fusion polypeptide comprises 2 or more NLSs.

[0414] Aspect 46. The fusion polypeptide of aspect 43, wherein the fusion polypeptide comprises an NLS at the C-terminus, at the N-terminus, or at the C-terminus and the N-terminus, of the fusion polypeptide.

[0415] Aspect 47. The fusion polypeptide of any one of aspects 32-42, further comprising an endosomolytic peptide.

[0416] Aspect 48. A nucleic acid comprising a nucleotide sequence encoding the fusion polypeptide of any one of aspects 32-47.

[0417] Aspect 49. The nucleic acid of aspect 48, wherein the nucleotide sequence is operably linked to a transcriptional control element.

[0418] Aspect 50. The nucleic acid of aspect 49, wherein the transcriptional control element is a promoter.

[0419] Aspect 51. The nucleic acid of aspect 50, wherein the promoter is a regulatable promoter.

[0420] Aspect 52. The nucleic acid of aspect 50 or aspect 51, wherein the promoter is functional in a eukaryotic cell.

[0421] Aspect 53. The nucleic acid of any one of aspects 48-52, further comprising a nucleotide sequence encoding a guide RNA, wherein the guide RNA comprises a guide sequence that is complementary to a target sequence of a target nucleic acid, and comprises a region that can bind to the RNA-guided effector polypeptide.

[0422] Aspect 54. A recombinant expression vector comprising the nucleic acid of any one of aspects 48-53.

[0423] Aspect 55. The recombinant expression vector of aspect 54, wherein the recombinant expression vector is recombinant viral expression vector.

[0424] Aspect 56. A ribonucleoprotein (RNP) complex comprising:

[0425] a) the fusion polypeptide of any one of aspects 32-47; and

[0426] b) a guide RNA, or a nucleic acid encoding the guide RNA, wherein the guide RNA comprises a guide sequence that is complementary to a target sequence of a target nucleic acid, and comprises a region that can bind to the RNA-guided effector polypeptide.

[0427] Aspect 57. The RNP complex of aspect 56, wherein the guide RNA is a single-molecule guide RNA.

[0428] Aspect 58. A composition comprising:

[0429] a) the RNP complex of aspect 56 or aspect 57; and

[0430] b) a pharmaceutically acceptable excipient.

[0431] Aspect 59. The composition of aspect 58, comprising a lipid.

[0432] Aspect 60. The composition of aspect 58, comprising a liposome, a hydrogel, a microparticle, a nanoparticle, or a block copolymer micelle.

[0433] Aspect 61. A kit comprising:

[0434] a) the RNA-guided effector polypeptide of any one of aspects 1-23, or the fusion polypeptide of any one of aspects 32-47; and

[0435] b) a guide RNA, or a nucleic acid encoding the guide RNA, wherein the guide RNA comprises a guide sequence that is complementary to a target sequence of a target nucleic acid, and comprises a region that can bind to the RNA-guided effector polypeptide.

[0436] Aspect 62. The kit of aspect 61, wherein the guide RNA is a single-molecule guide RNA.

[0437] Aspect 63. The kit of aspect 61 or aspect 62, wherein the RNA-guided effector polypeptide and the guide RNA are in separate containers.

[0438] Aspect 64. The kit of aspect 61 or aspect 62, wherein the RNA-guided effector polypeptide and the guide RNA are together in a single container.

[0439] Aspect 65. The kit of any one of aspects 61-64, wherein the guide RNA comprises one or more of: a modified nucleobase, a modified backbone or non-natural internucleoside linkage, a modified sugar moiety, a Locked Nucleic Acid, a Peptide Nucleic Acid, and a deoxyribonucleotide.

[0440] Aspect 66. The kit of any one of aspects 61-65, further comprising a donor nucleic acid template.

[0441] Aspect 67. A method of binding and/or modifying a target nucleic acid and/or modifying a polypeptide that binds to a target nucleic acid, the method comprising contacting the target nucleic acid with:

[0442] i) the RNA-guided effector polypeptide of any one of aspects 1-23; or

[0443] ii) the fusion polypeptide of any one of aspects 32-47.

[0444] Aspect 68. The method of aspect 67, wherein the target nucleic acid is selected from: double stranded DNA, single stranded DNA, RNA, genomic DNA, and extrachromosomal DNA.

[0445] Aspect 69. The method of aspect 67, wherein contacting results in genome editing.

[0446] Aspect 70. The method of aspect 67 or 68, wherein said contacting takes place outside of a bacterial cell and outside of an archaeal cell.

[0447] Aspect 71. The method of any one of aspects 67-69, wherein said contacting takes place in vitro outside of a cell.

[0448] Aspect 72. The method of any one of aspects 67-69, wherein said contacting takes place inside of a target cell.

[0449] Aspect 73. The method of aspect 72, wherein the target cell is a eukaryotic cell.

[0450] Aspect 74. The method of aspect 72 or aspect 73, wherein the target cell is in vivo.

[0451] Aspect 75. The method of aspect 72 or aspect 73, wherein the target cell is ex vivo.

[0452] Aspect 76. The method of aspect 72 or aspect 73, wherein the eukaryotic cell is selected from the group consisting of: a plant cell, a fungal cell, a single cell eukaryotic organism, a mammalian cell, a reptile cell, an insect cell, an avian cell, a fish cell, a parasite cell, an arthropod cell, a cell of an invertebrate, a cell of a vertebrate, a rodent cell, a mouse cell, a rat cell, a primate cell, a non-human primate cell, and a human cell.

[0453] Aspect 77. The method of any one of aspects 72-76, wherein said contacting further comprises: introducing a DNA donor template into the target cell.

### EXAMPLES

[0454] The following examples are put forth so as to provide those of ordinary skill in the art with a complete disclosure and description of how to make and use the present invention, and are not intended to limit the scope of what the inventors regard as their invention nor are they intended to represent that the experiments below are all or the only experiments performed. Efforts have been made to ensure accuracy with respect to numbers used (e.g. amounts, temperature, etc.) but some experimental errors and deviations should be accounted for. Unless indicated otherwise, parts are parts by weight, molecular weight is weight average molecular weight, temperature is in degrees Celsius, and pressure is at or near atmospheric. Standard abbreviations may be used, e.g., bp, base pair(s); kb, kilobase(s); pl, picoliter(s); s or sec, second(s); min, minute(s); h or hr, hour(s); aa, amino acid(s); kb, kilobase(s); bp, base pair(s); nt, nucleotide(s); i.m., intramuscular(ly); i.p., intraperitoneal(ly); s.c., subcutaneous(ly); and the like.

### Example 1: Generation of Deletion Variants that Retain Target Nucleic Acid Binding

### MISER Protocol

[0455] 1. A gene of interest is cloned into a suitable shuttle plasmid (e.g. pUC19).

[0456] 2. Primers are designed such that they contain homology to 60 bp or more of the gene of interest, and a Type II restriction site (e.g. XbaI) is inserted into the middle of this primer. This process is then repeated for every single amino acid position of the protein such that, in the end, there are tiled primers capable of annealing at every amino acid position of the protein.

[0457] 3. This process is repeated and a different, complementary restriction site (e.g. for XbaI, SpeI is suitable) is introduced into a second set of designed primers.

[0458] 4. Primers can be synthesized via standard commercial synthesis. Olio Library Synthesis (OLS) primers (LeProust E M, et al. (2010) Nucleic Acids Res 38: 2522-2540; Kosuri et al. (2010) Nat. Biotechnol. 28:1295) were used; the OLS primers were obtained from Agilent.

[0459] 5. Using recombineering (Higgins S A, Ouonkap S V Y, Savage D F. 2017. Rapid and Programmable Protein Mutagenesis Using Plasmid Recombineering. ACS Synth Biol 6: 1825-1833.), these primers can be used to mutagenize the shuttle plasmid in a cell (e.g., in an Escherichia coli cell in vitro). This process systematically inserts the restriction site designed in 2 and 3, above, into the gene of interest once per gene but does so at every site of the gene across the population of plasmids.

[0460] 6. This can be done in a variety of configurations but, briefly, in a typical work flow, recombineering would be carried out first for XbaI-containing primers, the plasmids would be miniprepped, treated with XbaI to confirm they contain a single XbaI site, and then recombineering would be repeated a second time with SpeI. At the end of recombineering, the library is a diverse series of plasmids in which a single plasmid contains just one XbaI and one SpeI randomly distributed throughout the gene. All possible positions are represented across the library of plasmids,

[0461] 7. The plasmid library is digested with XbaI and SpeI and plasmids are size-selected for electrophoresis or similar technique to select for desired deletion sizes. Recovered plasmids are re-ligated and transformed. (Cut XbaI and SpeI sites can ligated together).

[0462] 8. This library now contains targeted deletions across the gene, where average deletion size is controllable by size-selection in step 7.

[0463] 9. The protein library is assayed for function via a selection or screening assay. In the case of Cas9, one example of how this can be done is via a DNA-binding screen, e.g., as described in Oakes B L, Nadler D C, Savage D F. 2014. “Protein engineering of Cas9 for enhanced function.” Methods in Enzymology 546: 491-511. For example, catalytically inactive Cas9 (Cas9 lacking nuclease activity; “dCas9”) with a guide sequence of 5′-AACTTTCAGTTTAGCGGTCT-3′ (SEQ ID NO:897) can target and repress a genome-encoded red fluorescent protein (RFP) while avoiding repression of a genome-encoded upstream green fluorescent protein (GFP). In a screening context, this provides a simple output for assaying dCas9 target binding functionality (i.e. RFP knock-down) while correcting for extrinsic noise in the population by monitoring GFP. Briefly, cells containing functional dCas9 (dCas9 that, when complexed with a guide RNA, retains target nucleic acid binding) will repress RFP and express GFP while those with non-functional dCas9 will express both fluorescent proteins.

[0464] 10. Recovered libraries can be deep sequenced, the deletion site identified via bioinformatics, and compared to the initial library to quantitatively assess the functionality of a given deletion.

[0465] 11. This entire process gives all possible single contiguous deletions. Functional single deletions can be subjected to a second (or third, etc.) round to further investigate how deletions can be stacked together.

[0466] The above “MISER” protocol was used to generate deletions in Cas9 that retain the ability, when complexed with a guide RNA, to bind a target nucleic acid. Example data are shown in FIG. 8.

### Example 2: Mammalian CRISPR Interference Assay to Assess Function of Deletion Variants

[0467] CRISPR interference (CRISPRi) assays (FIGS. 24A-24E) were used to assess the function of deletion variants in mammalian cells. Specifically, using a CRISPRi-based competitive proliferation assay, human U-251 glioblastoma cells were stably transduced with lentiviral vectors (pSC066) expressing MISER-dCas9 (MISER-DelA^{KRAB}, MISER DelB^{KRAB}, MISER-DelC^{KRAB}, MISER-DelD^{KRAB}) or WT-dCas9 KRAB fusion proteins, followed by selection on puromycin. The positions of the DelA, DelB, DelC, and DelD deletions of the of the dCas9 polypeptide present in the dCas9-DelA^{KRAB}, dCas9-DelB^{KRAB}, dCas9-DelC^{KRAB}, and dCas9-DelD^{KRAB} fusions are as follows (amino acid numbering based on SEQ ID NO:5): delA: deletion of amino acids 180-297; delB: deletion of amino acids 503-708; delC: deletion of amino acids 792-897; and delD: deletion of amino acids 1010-1081. The respective cell lines were then transduced with a secondary lentiviral vector (pCF221) expressing mCherry fluorescent protein and either CRISPRi sgRNAs targeting essential genes proliferating cell nuclear antigen (PCNA) or replicating protein A1 (RPA1) (sgPCNA (sgRNAs i3, i4, and i6); or sgRPA1 (sgRNAs i1, i5, or i8) or non-targeting controls (sgNT (sgRNAs 1 and 2)). After mixing with the respective parental population (at approximately an 80:20 ratio of transduced to non-transduced cells), the percentage of mCherry positive cells was monitored by flow cytometry over several days to assess the effect of CRISPRi with the given Cas9-variant on cell proliferation. A functional CRISPRi variant is expected to inhibit essential gene expression, thus lowering the observed mCherry signal. Error bars indicate the standard deviation of triplicates. Significance in cell depletion was assessed by comparing samples to their respective day two controls using unpaired, two-tailed t-tests (alpha=0.01).

[0468] FIG. 24A-24E depicts the percentage of mCherry positive mammalian cells in a CRISPR interference assay to assess the function in mammalian cells (human U-251 glioblastoma) of dCas9 variants with deletions. FIG. 24A depicts the results using the WT (not deleted)-dCas9 construct fused to a KRAB repression domain. Sets of guide RNAs (CRISPRi sgRNAs) targeting three essential genes, proliferating cell nuclear antigen (PCNA) (sgPCNA: sgRNAs i3, i4, and i6) or replicating protein A1 (RPA1) (sgRPA1: sgRNAs i1, i5, or i8) or non-targeting controls (sgNT (sgRNAs 1 and 2)) where the target guide RNAs are also co-expressed with the mCherry fluorescent protein reporter Cells were analyzed on days 2, 5, 9. The results demonstrate that the WT-cCas9 KRAB construct is able to repress mCherry signal. FIG. 24B depicts the same experiment using the MISER-DelA-KRAB fusion in place of the WT construct, and demonstrates that the amount of repression is less that with the WT cCas9 construct while others demonstrated repression. The DelA construct comprises deletions in the dCas9 helix I and II regions. FIG. 24C similarly depicts the results with the MISER-DelB-KRAB construct where none of the samples exhibited significant repression. The DelB construct comprises deletions in the dCas9 helix II regions. FIG. 24D depicts the results with the MISER-DelC-KRAB construct and demonstrates that all of the samples demonstrated significant repression at day 9 as compared to day 2. The DelC construct comprises deletions in the dCas9 HNH nuclease domain FIG. 24E depicts the results with the MISER0DelD-KRAB construct and demonstrated that many of the samples shows significant expression. The DelD construct comprises deletions in the dCas9 RuvC nuclease domain. (*) means significant repression compared to day 2 results of the grouping.

[0469] As shown in FIG. 24A, the wild-type (non-deleted) dCas9-KRAB fusion protein effectively inhibited PCNA expression and RPA1 expression. As shown in FIG. 24B, the DelA-dCas9-KRAB fusion protein (MISER-DelA′), combined with the i6 sgRNA, was effective in inhibiting PCNA gene expression. Similarly, as shown in FIG. 24B, the DelA-dCas9-KRAB fusion protein (MISER-DelA′), combined with the i5 sgRNA, was effective in inhibiting RPA1 gene expression. As shown in FIG. 24D, the DelC-dCas9-KRAB fusion protein (MISER-DelC^{KRAB}) (in combination with i3, i4, or i6 sgRNAs) effectively inhibited expression of PCNA; and (in combination with it or i5 sgRNAs) effectively inhibited expression of RPA1. As shown in FIG. 24E, the DelD-dCas9-KRAB fusion protein (MISER-DelD^{KRAB}) (in combination with i6 sgRNA) effectively inhibited expression of PCNA; and (in combination with i5 sgRNA) effectively inhibited expression of RPA1.

[0470] FIG. 25 provides an immunoblotting assay for Flag-tagged MISER-dCas9 or WT-dCas9 KRAB fusion proteins stably expressed in U-251 cells co-expressing a non-targeting guide (sgNT1). The indicated MISER deletions resulted in reduction of protein size. Beta-actin (ACTB) was used as loading control. Protein ladders indicated reference molecular weight markers in kDa.

### Example 3: In Vitro Binding of WT dCas9 and Variants Δ3CE, and Δ4CE

[0471] In vitro function of WT-dCas9 and variants Δ3CE and Δ4CE was assessed using an RNP-based gel shift assay (FIG. 26). WT dCas9 and stacked variants Δ3CE and Δ4CE were expressed and purified to homogeneity from E. coli. Oligonucleotide-based target dsDNAs were designed possessing either a low (˜30%, 298.2 tdTomato and DYRK1-BS14) or high (70%, B9) GC-content in the PAM proximal region. dsDNA was labeled on the 5′ end of the non-target strand using either FAM or Cy5 fluorophores. RNP was formed following the protocol in Lin et al. (Lin et al. (2014) eLife; 3: e04766) with sgRNA against the respective target sequence. For gel shift, 300 nM RNP was incubated with 30 nM dsDNA target. The results were analyzed using gel electrophoresis and quantified using fluorescence of the gel-shifted fluorescently labeled dsDNA.

[0472] While the present invention has been described with reference to the specific embodiments thereof, it should be understood by those skilled in the art that various changes may be made and equivalents may be substituted without departing from the true spirit and scope of the invention. In addition, many modifications may be made to adapt a particular situation, material, composition of matter, process, process step or steps, to the objective, spirit and scope of the present invention. All such modifications are intended to be within the scope of the claims appended hereto.

The application's sequence listing, which the Patent Office published only in electronic form, follows.

SEQUENCE LISTING (901 sequences)

SEQ ID NO: 1 - protein, 167 aa, Escherichia coli
MSEVEFSHEYWMRHALTLAKRAWDEREVPVGAVLVHNNRVIGEGWNRPIGRHDPTAHAEIMALRQGGLVMQNYRLIDATLYVTLEPCVMCAGAMIHSRIGRVVFGARDAKTGAAGSLMDVLHHPGMNHRVEITEGILADECAALLSDFFRMRRQEIKAQKKAQSSTD

SEQ ID NO: 2 - protein, 178 aa, Escherichia coli
MRRAFITGVFFLSEVEFSHEYWMRHALTLAKRAWDEREVPVGAVLVHNNRVIGEGWNRPIGRHDPTAHAEIMALRQGGLVMQNYRLIDATLYVTLEPCVMCAGAMIHSRIGRVVFGARDAKTGAAGSLMDVLHHPGMNHRVEITEGILADECAALLSDFFRMRRQEIKAQKKAQSSTD

SEQ ID NO: 3 - protein, 160 aa, Staphylococcus aureus
MGSHMTNDIYFMTLAIEEAKKAAQLGEVPIGAIITKDDEVIARAHNLRETLQQPTAHAEHIAIERAAKVLGSWRLEGCTLYVTLEPCVMCAGTIVMSRIPRVVYGADDPKGGCSGSLMNLLQQSNFNHRAIVDKGVLKEACSTLLTTFFKNLRANKKSTN

SEQ ID NO: 4 - protein, 161 aa, Bacillus subtilis
MTQDELYMKEAIKEAKKAEEKGEVPIGAVLVINGEIIARAHNLRETEQRSIAHAEMLVIDEACKALGTWRLEGATLYVTLEPCPMCAGAVVLSRVEKVVFGAFDPKGGCSGTLMNLLQEERFNHQAEVVSGVLEEECGGMLSAFFRELRKKKKAARKNLSE

SEQ ID NO: 5 - protein, 1368 aa, Streptococcus pyogenes [sequence omitted]

SEQ ID NO: 6 - protein, 1367 aa, Streptococcus pyogenes
MDKKYSIGLDIGTNSVGWAVITDDYKVPSKKLKVLGNTDRHGIKKNLIGALLFDSGETAEATRLKRTARRRYTRRKNRICYLQEIFSNEMAKVDDSFFHRLEESFLVEEDKKHERHPIFGNIVDEVAYHEKYPTIYHLRKKLADSTDKVDLRLIYLALAHMIKFRGHFLIEGDLNPDNSDVDKLFIQLVQTYNQLFEENPINASRVDAKAILSARLSKSRRLENLIAQLPGEKKNGLFGNLIALSLGLTPNFKSNFDLAEDAKLQLSKDTYDDDLDNLLAQIGDQYADLFLAAKNLSDAILLSDILRVNSEITKAPLSASMIKRYDEHHQDLTLLKALVRQQLPEKYKEIFFDQSKNGYAGYIDGGASQEEFYKFIKPILEKMDGTEELLAKLNREDLLRKQRTFDNGSIPYQIHLGELHAILRRQEDFYPFLKDNREKIEKILTFRIPYYVGPLARGNSRFAWMTRKSEETITPWNFEEVVDKGASAQSFIERMTNFDKNLPNEKVLPKHSLLYEYFTVYNELTKVKYVTEGMRKPAFLSGEQKKAIVDLLFKTNRKVTVKQLKEDYFKKIECFDSVEISGVEDRFNTSLGTYHDLLKIIKDKDFLDNEENEDILEDIVLTLTLFEDKEMIEERLKKYANLFDDKVMKQLKRRHYTGWGRLSRKLINGIRDKQSGKTILDFLKSDGFANRNFMQLINDDSLTFKEAIQKAQVSGQGHSLHEQIANLAGSPAIKKGILQTVKIVDELVKVMGHKPENIVIEMARENQTTQKGQKNSRERMKRIEEGIKELGSQILKEHPVENTQLQNEKLYLYYLQNGRDMYVDQELDINRLSDYDVDHIVPQSFLKDDSIDNKVLTRSDKNRGKSDNVPSEEVVKKMKNYWRQLLNAKLITQRKFDNLTKAERGGLSELDKAGFIKRQLVETRQITKHVAQILDSRMNTKYDENDKLIREVKVITLKSKLVSDFRKDFQFYKVREINNYHHAHDAYLNAVVGTALIKKYPKLESEFVYGDYKVYDVRKMIAKSEQEIGKATAKYFFYSNIMNFFKTEITLANGEIRKRPLIETNGETGEIVWDKGRDFATVRKVLSMPQVNIVKKTEVQTGGFSKESILPKRNSDKLIARKKDWDPKKYGGFDSPTVAYSVLVVAKVEKGKSKKLKSVKELLGITIMERSSFEKNPIDFLEAKGYKEVRKDLIIKLPKYSLFELENGRKRMLASAGELQKGNELALPSKYVNFLYLASHYEKLKGSPEDNEQKQLFVEQHKHYLDEIIEQISEFSKRVILADANLDKVLSAYNKHRDKPIREQAKNIIHLFTLTNLGAPAAFKYFDTTIERNRYKSIKEVLDATLIHQSITGLYEIRIDLSQLGGD

SEQ ID NO: 7 - protein, 1056 aa, Pasteurella multocida
MQTTNLSYILGLDLGIASVGWAVVEINENEDPIGLIDVGVRIFERAEVPKTGESLALSRRLARSTRRLIRRRAHRLLLAKRFLKREGILSTIDLEKGLPNQAWELRVAGLERRLSAIEWGAVLLHLIKHRGYLSKRKNESQTNNKELGALLSGVAQNHQLLQSDDYRTPAELALKKFAKEEGHIRNQRGAYTHTFNRLDLLAELNLLFAQQHQFGNPHCKEHIQQYMTELLMWQKPALSGEAILKMLGKCTHEKNEFKAAKHTYSAERFVWLTKLNNLRILEDGAERALNEEERQLLINHPYEKSKLTYAQVRKLLGLSEQAIFKHLRYSKENAESATFMELKAWHAIRKALENQGLKDTWQDLAKKPDLLDEIGTAFSLYKTDEDIQQYLTNKVPNSVINALLVSLNFDKFIELSLKSLRKILPLMEQGKRYDQACREIYGHHYGEANQKTSQLLPAIPAQEIRNPVVLRTLSQARKVINAIIRQYGSPARVHIETGRELGKSFKERREIQKQQEDNRTKRESAVQKFKELFSDFSSEPKSKDILKFRLYEQQHGKCLYSGKEINIHRLNEKGYVEIDHALPFSRTWDDSFNNKVLVLASENQNKGNQTPYEWLQGKINSERWKNFVALVLGSQCSAAKKQRLLTQVIDDNKFIDRNLNDTRYIARFLSNYIQENLLLVGKNKKNVFTPNGQITALLRSRWGLIKARENNNRHHALDAIVVACATPSMQQKITRFIRFKEVHPYKIENRYEMVDQESGEIISPHFPEPWAYFRQEVNIRVFDNHPDTVLKEMLPDRPQANHQFVQPLFVSRAPTRKMSGQGHMETIKSAKRLAEGISVLRIPLTQLKPNLLENMVNKEREPALYAGLKARLAEFNQDPAKAFATPFYKQGGQQVKAIRVEQVQKSGVLVRENNGVADNASIVRTDVFIKNNKFFLVPIYTWQVAKGILPNKAIVAHKNEDEWEEMDEGAKFKFSLFPNDLVELKTKKEYFFGYYIGLDRATGNISLKEHDGEISKGKDGVYRVGVKLALSFEKYQVDELGKNRQICRPQQRQPVR

SEQ ID NO: 8 - protein, 1368 aa, Streptococcus pyogenes
MDKKYSIGLDIGTNSVGWAVITDDYKVPSKKLKGLGNTDRHGIKKNLIGALLFDSGETAEATRLKRTARRRYTRRKNRICYLQEIFSNEMAKVDDSFFHRLEESFLVEEDKKHERHPIFGNIVDEVAYHEKYPTIYHLRKKLADSTDKVDLRLIYLALAHMIKFRGHFLIEGDLNPDNSDVDKLFIQLVQTYNQLFEENPINASRVDAKAILSARLSKSRRLENLIAQLPGEKKNGLFGNLIALSLGLTPNFKSNFDLAEDAKLQLSKDTYDDDLDNLLAQIGDQYADLFLAAKNLSDATLLSDILRVNSEITKAPLSASMIKRYDEHHQDLTLLKALVRQQLPEKYKEIFFDQSKNGYAGYIDGGASQEEFYKFIKPILEKMDGTEELLAKLNREDLLRKQRTFDNGSIPYQIHLGELHAILRRQEDFYPFLKDNREKIEKILTFRIPYYVGPLARGNSRFAWMTRKSEETITPWNFEEVVDKGASAQSFIERMTNFDKNLPNEKVLPKHSLLYEYFTVYNELTKVKYVTEGMRKPAFLSGEQKKAIVDLLFKTNRKVTVKQLKEDYFKKIECFDSVEISGVEDRFNASLGTYHDLLKIIKDKDFLDNEENEDILEDIVLTLTLFEDREMIEERLKTYAHLFDDKVMKQLKRRRYTGWGRLSRKLINGIRDKQSGKTILDFLKSDGFANRNFMQLIHDDSLTFKEDIQKAQVSGQGDSLHEHIANLAGSPAIKKGILQTVKVVDELVKVMGRHKPENIVIEMARENQTTQKGQKNSRERMKRIEEGIKELGSDILKEYPVENTQLQNEKLYLYYLQNGRDMYVDQELDINRLSDYDVDHIVPQSFLKDDSIDNKVLTRSDKNRGKSDNVPSEEVVKKMKNYWRQLLNAKLITQRKFDNLTKAERGGLSELDKVGFIKRQLVETRQITKHVAQILDSRMNTKYDENDKLIREVRVITLKSKLVSDFRKDFQFYKVREINNYHHAHDAYLNAVVGTALIKKYPKLESEFVYGDYKVYDVRKMIAKSEQEIGKATAKYFFYSNIMNFFKTEITLANGEIRKRPLIETNGETGEIVWDKGRDFATVRKVLSMPQVNIVKKTEVQTGGFSKESILPKRNSDKLIARKKDWDPKKYGGFDSPTVAYSVLVVAKVEKGKSKKLKSVKELLGITIMERSSFEKDPIDFLEAKGYKEVRKDLIIKLPKYSLFELENGRKRMLASAGELQKGNELALPSKYVNFLYLASHYEKLKGSPEDNEQKQLFVEQHKHYLDEIIEQISEFSKRVILADANLDKVLSAYNKHRDKPIREQAENIIHLFTLTNLGAPAAFKYFDTTIDRKRYTSTKEVLDATLIHQSITGLYETRIDLSQLGGD

SEQ ID NO: 9 - protein, 1334 aa, Listeria innocua
MKKPYTIGLDIGTNSVGWAVLTDQYDLVKRKMKIAGDSEKKQIKKNFWGVRLFDEGQTAADRRMARTARRRIERRRNRISYLQGIFAEEMSKTDANFFCRLSDSFYVDNEKRNSRHPFFATIEEEVEYHKNYPTIYHLREELVNSSEKADLRLVYLALAHIIKYRGNFLIEGALDTQNTSVDGIYKQFIQTYNQVFASGIEDGSLKKLEDNKDVAKILVEKVTRKEKLERILKLYPGEKSAGMFAQFISLIVGSKGNFQKPFDLIEKSDIECAKDSYEEDLESLLALIGDEYAELFVAAKNAYSAVVLSSIITVAETETNAKLSASMIERFDTHEEDLGELKAFIKLHLPKHYEEIFSNTEKHGYAGYIDGKTKQADFYKYMKMTLENIEGADYFIAKIEKENFLRKQRTFDNGAIPHQLHLEELEAILHQQAKYYPFLKENYDKIKSLVTFRIPYFVGPLANGQSEFAWLTRKADGEIRPWNIEEKVDFGKSAVDFIEKMTNKDTYLPKENVLPKHSLCYQKYLVYNELTKVRYINDQGKTSYFSGQEKEQIFNDLFKQKRKVKKKDLELFLRNMSHVESPTIEGLEDSFNSSYSTYHDLLKVGIKQEILDNPVNTEMLENIVKILTVFEDKRMIKEQLQQFSDVLDGVVLKKLERRHYTGWGRLSAKLLMGIRDKQSHLTILDYLMNDDGLNRNLMQLINDSNLSFKSIIEKEQVTTADKDIQSIVADLAGSPAIKKGILQSLKIVDELVSVMGYPPQTIVVEMARENQTTGKGKNNSRPRYKSLEKAIKEFGSQILKEHPTDNQELRNNRLYLYYLQNGKDMYTGQDLDIHNLSNYDIDHIVPQSFITDNSIDNLVLTSSAGNREKGDDVPPLEIVRKRKVFWEKLYQGNLMSKRKFDYLTKAERGGLTEADKARFIHRQLVETRQITKNVANILHQRFNYEKDDHGNTMKQVRIVTLKSALVSQFRKQFQLYKVRDVNDYHHAHDAYLNGVVANTLLKVYPQLEPEFVYGDYHQFDWFKANKATAKKQFYTNIMLFFAQKDRIIDENGEILWDKKYLDTVKKVMSYRQMNIVKKTEIQKGEFSKATIKPKGNSSKLIPRKTNWDPMKYGGLDSPNMAYAVVIEYAKGKNKLVFEKKIIRVTIMERKAFEKDEKAFLEEQGYRQPKVLAKLPKYTLYECEEGRRRMLASANEAQKGNQQVLPNHLVTLLHHAANCEVSDGKSLDYIESNREMFAELLAHVSEFAKRYTLAEANLNKINQLFEQNKEGDIKAIAQSFVDLMAFNAMGAPASFKFFETTIERKRYNNLKELLNSTIIYQSITGLYESRKRLDD

SEQ ID NO: 10 - protein, 1368 aa, Streptococcus pyogenes; identical to SEQ ID NO: 8

SEQ ID NO: 11 - protein, 1370 aa, Streptococcus agalactiae
MNKPYSIGLDIGTNSVGWSIITDDYKVPAKKMRVLGNTDKEYIKKNLIGALLFDGGNTAADRRLKRTARRRYTRRRNRILYLQEIFAEEMSKVDDSFFHRLEDSFLVEEDKRGSKYPIFATLQEEKDYHEKFSTIYHLRKELADKKEKADLRLIYIALAHIIKFRGHFLIEDDSFDVRNTDISKQYQDFLEIFNTTFENNDLLSQNVDVEAILTDKISKSAKKDRILAQYPNQKSTGIFAEFLKLIVGNQADFKKYFNLEDKTPLQFAKDSYDEDLENLLGQIGDEFADLFSAAKKLYDSVLLSGILTVIDLSTKAPLSASMIQRYDEHREDLKQLKQFVKASLPEKYQEIFADSSKDGYAGYIEGKTNQEAFYKYLSKLLTKQEDSENFLEKIKNEDFLRKQRTFDNGSIPHQVHLTELKAIIRRQSEYYPFLKENQDRIEKILTFRIPYYIGPLAREKSDFAWMTRKTDDSIRPWNFEDLVDKEKSAEAFIHRMTNNDFYLPEEKVLPKHSLIYEKFTVYNELTKVRYKNEQGETYFFDSNIKQEIFDGVFKEHRKVSKKKLLDFLAKEYEEFRIVDVIGLDKENKAFNASLGTYHDLEKILDKDFLDNPDNESILEDIVQTLTLFEDREMIKKRLENYKDLFTESQLKKLYRRHYTGWGRLSAKLINGIRDKESQKTILDYLIDDGRSNRNFMQLINDDGLSFKSIISKAQAGSHSDNLKEVVGELAGSPAIKKGILQSLKIVDELVKVMGYEPEQIVVEMARENQTTNQGRRNSRQRYKLLDDGVKNLASDLNGNILKEYPTDNQALQNERLFLYYLQNGRDMYTGEALDIDNLSQYDIDHIIPQAFIKDDSIDNRVLVSSAKNRGKSDDVPSLEIVKDCKVFWKKLLDAKLMSQRKYDNLTKAERGGLTSDDKARFIQRQLVETRQITKHVARILDERFNNELDSKGRRIRKVKIVTLKSNLVSNFRKEFGFYKIREVNNYHHAHDAYLNAVVAKAILTKYPQLEPEFVYGDYPKYNSYKTRKSATEKLFFYSNIMNFFKTKVTLADGTVVVKDDIEVNNDTGEIVWDKKKHFATVRKVLSYPQNNIVKKTEIQTGGFSKESILAHGNSDKLIPRKTKDIYLDPKKYGGFDSPIVAYSVLVVADIKKGKAQKLKTVTELLGITIMERSRFEKNPSAFLESKGYLNIRADKLIILPKYSLFELENGRRRLLASAGELQKGNELALPTQFMKFLYLASRYNESKGKPEEIEKKQEFVNQHVSYFDDILQLINDFSKRVILADANLEKINKLYQDNKENISVDELANNIINLFTFTSLGAPAAFKFFDKIVDRKRYTSTKEVLNSTLIHQSITGLYETRIDLGKLGED

SEQ ID NO: 12 - protein, 1345 aa, Streptococcus mutans
MKKPYSIGLDIGTNSVGWAVVTDDYKVPAKKMKVLGNTDKSHIEKNLLGALLFDSGNTAEDRRLKRTARRRYTRRRNRILYLQEIFSEEMGKVDDSFFHRLEDSFLVTEDKRGERHPIFGNLEEEVKYHENFPTIYHLRQYLADNPEKVDLRLVYLALAHIIKFRGHFLIEGKFDTRNNDVQRLFQEFLAVYDNTFENSSLQEQNVQVEEILTDKISKSAKKDRVLKLFPNEKSNGRFAEFLKLIVGNQADFKKHFELEEKAPLQFSKDTYEEELEVLLAQIGDNYAELFLSAKKLYDSILLSGILTVTDVGTKAPLSASMIQRYNEHQMDLAQLKQFIRQKLSDKYNEVFSDVSKDGYAGYIDGKTNQEAFYKYLKGLLNKIEGSGYFLDKIEREDFLRKQRTFDNGSIPHQIHLQEMRAIIRRQAEFYPFLADNQDRIEKLLTFRIPYYVGPLARGKSDFAWLSRKSADKITPWNFDEIVDKESSAEAFINRMTNYDLYLPNQKVLPKHSLLYEKFTVYNELTKVKYKTEQGKTAFFDANMKQEIFDGVFKVYRKVTKDKLMDFLEKEFDEFRIVDLTGLDKENKVFNASYGTYHDLCKILDKDFLDNSKNEKILEDIVLTLTLFEDREMIRKRLENYSDLLTKEQVKKLERRHYTGWGRLSAELIHGIRNKESRKTILDYLIDDGNSNRNFMQLINDDALSFKEEIAKAQVIGETDNLNQVVSDIAGSPAIKKGILQSLKIVDELVKIMGHQPENIVVEMARENQFTNQGRRNSQQRLKGLTDSIKEFGSQILKEHPVENSQLQNDRLFLYYLQNGRDMYTGEELDIDYLSQYDIDHIIPQAFIKDNSIDNRVLTSSKENRGKSDDVPSKDVVRKMKSYWSKLLSAKLITQRKFDNLTKAERGGLTDDDKAGFIKRQLVETRQITKHVARILDERFNTETDENNKKIRQVKIVTLKSNLVSNFRKEFELYKVREINDYHHAHDAYLNAVIGKALLGVYPQLEPEFVYGDYPHFHGHKENKATAKKFFYSNIMNFFKKDDVRTDKNGEIIWKKDEHISNIKKVLSYPQVNIVKKVEEQTGGFSKESILPKGNSDKLIPRKTKKFYWDTKKYGGFDSPIVAYSILVIADIEKGKSKKLKTVKALVGVTIMEKMTFERDPVAFLERKGYRNVQEENIIKLPKYSLFKLENGRKRLLASARELQKGNEIVLPNHLGTLLYHAKNIHKVDEPKHLDYVDKHKDEFKELLDVVSNFSKKYTLAEGNLEKIKELYAQNNGEDLKELASSFINLLTFTAIGAPATFKFFDKNIDRKRYTSTTEILNATLIHQSITGLYETRIDLNKLGGD

SEQ ID NO: 13 - protein, 1377 aa, Streptococcus agalactiae
MNKPYSIGLDIGTNSVGWSIITDDYKVPAKKMRVLGNTDKEYIKKNLIGALLFDGGNTAADRRLKRTARRRYTRRRNRILYLQEIFAEEMSKVDDSFFHRLEDSFLVEEDKRGSKYPIFATMQEEKYYHEKFPTIYHLRKELADKKEKADLRLVYLALAHIIKFRGHFLIEDDRFDVRNTDIQKQYQAFLEIFDTTFENNHLLSQNVDVEAILTDKISKSAKKDRILAQYPNQKSTGIFAEFLKLIVGNQADFKKHFNLEDKTPLQFAKDSYDEDLENLLGQIGDEFADLFSVAKKLYDSVLLSGILTVTDLSTKAPLSASMIQRYDEHHEDLKHLKQFVKASLPENYREVFADSSKDGYAGYIEGKTNQEAFYKYLLKLLTKQEGSEYFLEKIKNEDFLRKQRTFDNGSIPHQVHLTELRAIIRRQSEYYPFLKENQDRIEKILTFRIPYYVGPLAREKSDFAWMTRKTDDSIRPWNFEDLVDKEKSAEAFIHRMTNNDLYLPEEKVLPKHSLIYEKFTVYNELTKVRFLAEGFKDFQFLNRKQKETIFNSLFKEKRKVTEKDIISFLNKVDGYEGIAIKGIEKQFNASLSTYHDLKKILGKDFLDNTDNELILEDIVQTLTLFEDREMIKKCLDIYKDFFTESQLKKLYRRHYTGWGRLSAKLINGIRNKENQKTILDYLIDDGSANRNFMQLINDDDLSFKPIIDKARTGSHSDNLKEVVGELAGSPAIKKGILQSLKIVDELVKVMGYEPEQIVVEMARENQTTAKGLSRSRQRLTTLRESLANLKSNILEEKKPKYVKDQVENHHLSDDRLFLYYLQNGRDMYTKKALDIDNLSQYDIDHIIPQAFIKDDSIDNRVLVSSAKNRGKSDDVPSIEIVKARKMFWKNLLDAKLMSQRKYDNLTKAERGGLTSDDKARFIQRQLVETRQITKHVARILDERFNNEVDNGKKICKVKIVTLKSNLVSNFRKEFGFYKIREVNDYHHAHDAYLNAVVAKAILTKYPQLEPEFVYGMYRQKKLSKIVHEDKEEKYSEATRKMFFYSNLMNMFKRVVRLADGSIVVRPVIETGRYMRKTAWDKKKHFATVRKVLSYPQNNIVKKTEIQTGGFSKESILAHGNSDKLIPRKTKDIYLDPKKYGGFDSPIVAYSVLVVADIKKGKAQKLKTVTELLGITIMERSRFEKNPSAFLESKGYLNIRDDKLMILPKYSLFELENGRRRLLASAGELQKGNELALPTQFMKFLYLASRYNESKGKPEEIEKKQEFVNQHVSYFDDILQLINDFSKRVILADANLEKINKLYQDNKENIPVDELANNIINLFTFTSLGAPAAFKFFDKIVDRKRYTSTKEVLNSTLIHQSITGLYETRIDLGKLGED

SEQ ID NO: 14 - protein, 131 aa, Helicobacter hepaticus
MRILGFDIGITSIGWAYVESNELKDCGVRIFTKAENPKNGDSLAAPRREARGARRRLARRKARLNAIKRLLCKEFELNLNDYLANDGELPKAYQTSKDTKSPYELYTAFHWIIFAFCSIASSLSNRQMLPI

SEQ ID NO: 15 - protein, 1059 aa, Wolinella succinogenes
MIERILGVDLGISSLGWAIVEYDKDDEAANRIIDCGVRLFTAAETPKKKESPNKARREARGIRRVLNRRRVRMNMIKKLFLRAGLIQDVDLDGEGGMFYSKANRADVWELRHDGLYRLLKGDELARVLIHIAKHRGYKFIGDDEADEESGKVKKAGVVLRQNFEAAGCRTVGEWLWRERGANGKKRNKHGDYEISIHRDLLVEEVEAIFVAQQEMRSTIATDALKAAYREIAFFVRPMQRIEKMVGHCTYFPEERRAPKSAPTAEKFIAISKFFSTVIIDNEGWEQKIIERKTLEELLDFAVSREKVEFRHLRKFLDLSDNEIFKGLHYKGKPKTAKKREATLFDPNEPTELEFDKVEAEKKAWISLRGAAKLREALGNEFYGRFVALGKHADEATKILTYYKDEGQKRRELTKLPLEAEMVERLVKIGFSDFLKLSLKAIRDILPAMESGARYDEAVLMLGVPHKEKSAILPPLNKTDIDILNPTVIRAFAQFRKVANALVRKYGAFDRVHFELAREINTKGEIEDIKESQRKNEKERKEAADWIAETSFQVPLTRKNILKKRLYIQQDGRCAYTGDVIELERLFDEGYCEIDHILPRSRSADDSFANKVLCLARANQQKTDRTPYEWFGHDAARWNAFETRTSAPSNRVRTGKGKIDRLLKKNFDENSEMAFKDRNLNDTRYMARAIKTYCEQYWVFKNSHTKAPVQVRSGKLTSVLRYQWGLESKDRESHTHHAVDAIIIAFSTQGMVQKLSEYYRFKETHREKERPKLAVPLANFRDAVEEATRIENTETVKEGVEVKRLLISRPPRARVTGQAHEQTAKPYPRIKQVKNKKKWRLAPIDEEKFESFKADRVASANQKNFYETSTIPRVDVYHKKGKFHLVPIYLHEMVLNELPNLSLGTNPEAMDENFFKFSIFKDDLISIQTQGTPKKPAKIIMGYFKNMHGANMVLSSINNSPCEGFTCTPVSMDKKHKDKCKLCPEENRIAGRCLQGFLDYWSQEGLRPPRKEFECDQGVKFALDVKKYQIDPLGYYYEVKQEKRLGTIPQMRSAKKLVKK

SEQ ID NO: 16 - protein, 1409 aa, Wolinella succinogenes
MLVSPISVDLGGKNTGFFSFTDSLDNSQSGTVIYDESFVLSQVGRRSKRHSKRNNLRNKLVKRLFLLILQEHHGLSIDVLPDEIRGLFNKRGYTYAGFELDEKKKDALESDTLKEFLSEKLQSIDRDSDVEDFLNQIASNAESFKDYKKGFEAVFASATHSPNKKLELKDELKSEYGENAKELLAGLRVTKEILDEFDKQENQGNLPRAKYFEELGEYIATNEKVKSFFDSNSLKLTDMTKLIGNISNYQLKELRRYFNDKEMEKGDIWIPNKLHKITERFVRSWHPKNDADRQRRAELMKDLKSKEIMELLTTTEPVMTIPPYDDMNNRGAVKCQTLRLNEEYLDKHLPNWRDIAKRLNHGKFNDDLADSTVKGYSEDSTLLHRLLDTSKEIDIYELRGKKPNELLVKTLGQSDANRLYGFAQNYYELIRQKVRAGIWVPVKNKDDSLNLEDNSNMLKRCNHNPPHKKNQIHNLVAGILGVKLDEAKFAEFEKELWSAKVGNKKLSAYCKNIEELRKTHGNTFKIDIEELRKKDPAELSKEEKAKLRLTDDVILNEWSQKIANFFDIDDKHRQRFNNLFSMAQLHTVIDTPRSGFSSTCKRCTAENRFRSETAFYNDETGEFHKKATATCQRLPADTQRPFSGKIERYIDKLGYELAKIKAKELEGMEAKEIKVPIILEQNAFEYEESLRKSKTGSNDRVINSKKDRDGKKLAKAKENAEDRLKDKDKRIKAFSSGICPYCGDTIGDDGEIDHILPRSHTLKIYGTVFNPEGNLIYVHQKCNQAKADSIYKLSDIKAGVSAQWIEEQVANIKGYKTFSVLSAEQQKAFRYALFLQNDNEAYKKVVDWLRTDQSARVNGTQKYLAKKIQEKLTKMLPNKHLSFEFILADATEVSELRRQYARQNPLLAKAEKQAPSSHAIDAVMAFVARYQKVFKDGTPPNADEVAKLAMLDSWNPASNEPLTKGLSTNQKIEKMIKSGDYGQKNMREVFGKSIFGENAIGERYKPIVVQEGGYYIGYPATVKKGYELKNCKVVTSKNDIAKLEKIIKNQDLISLKENQYIKIFSINKQTISELSNRYFNMNYKNLVERDKEIVGLLEFIVENCRYYTKKVDVKFAPKYIHETKYPFYDDWRRFDEAWRYLQENQNKTSSKDRFVIDKSSLNEYYQPDKNEYKLDVDTQPIWDDFCRWYFLDRYKTANDKKSIRIKARKTFSLLAESGVQGKVFRAKRKIPTGYAYQALPMDNNVIAGDYANILLEANSKTLSLVPKSGISIEKQLDKKLDVIKKTDVRGLAIDNNSFFNADFDTHGIRLIVENTSVKVGNFPISAIDKSAKRMIFRALFEKEKGKRKKKTTISFKESGPVQDYLKVFLKKIVKIQLRTDGSISNIVVRKNAADFTLSFRSEHIQKLLK

SEQ ID NO: 17 - protein, 1374 aa, Fusobacterium nucleatum
MKKQKFSDYYLGFDIGTNSVGWCVTDLDYNVLRFNKKDMWGSRLFDEAKTAAERRVQRNSRRRLKRRKWRLNLLEEIFSDEIMKIDSNFFRRLKESSLWLEDKNSKEKFTLFNDDNYKDYDFYKQYPTIFHLRDELIKNPEKKDIRLIYLALHSIFKSRGHFLFEGQNLKEIKNFETLYNNLISFLEDNGINKSIDKDNIEKLEKIICDSGKGLKDKEKEFKGIFNSDKQLVAIFKLSVGSSVSLNDLFDTDEYKKEEVEKEKISFREQIYEDDKPIYYSILGEKIELLDIAKSFYDFMVLNNILSDSNYISEAKVKLYEEHKKDLKNLKYIIRKYNKENYDKLFKDKNENNYPAYIGLNKEKDKKEVVEKSRLKIDDLIKVIKGYLPKPERIEEKDKTIFNEILNKIELKTILPKQRISDNGTLPYQIHEVELEKILENQSKYYDFLNYEENGVSTKDKLLKTFKFRIPYYVGPLNSYHKDKGGNSWIVRKEEGKILPWNFEQKVDIEKSAEEFIKRMTNKCTYLNGEDVIPKDSFLYSEYIILNELNKVQVNDEFLNEENKRKIIDELFKENKKVSEKKFKEYLLVNQIANRTVELKGIKDSFNSNYVSYIKFKDIFGEKLNLDIYKEISEKSILWKCLYGDDKKIFEKKIKNEYGDILNKDEIKKINSFKFNTWGRLSEKLLTGIEFINLETGECYSSVMEALRRTNYNLMELLSSKFTLQESIDNENKEMNEVSYRDLIEESYVSPSLKRAILQTLKIYEEIKKITGRVPKKVFIEMARGGDESMKNKKIPARQEQLKKLYDSCGNDIANFSIDIKEMKNSLSSYDNNSLRQKKLYLYYLQFGKCMYTGREIDLDRLLQNNDTYDIDHIYPRSKVIKDDSFDNLVLVLKNENAEKSNEYPVKKEIQEKMKSFWRFLKEKNFISDEKYKRLTGKDDFELRGFMARQLVNVRQTTKEVGKILQQIEPEIKIVYSKAEIASSFREMFDFIKVRELNDTHHAKDAYLNIVAGNVYNTKFTEKPYRYLQEIKENYDVKKIYNYDIKNAWDKENSLEIVKKNMEKNTVNITRFIKEEKGELFNLNPIKKGETSNEIISIKPKLYDGKDNKLNEKYGYYTSLKAAYFIYVEHEKKNKKVKTFERITRIDSTLIKNEKNLIKYLVSQKKLLNPKIIKKIYKEQTLIIDSYPYTFTGVDSNKKVELKNKKQLYLEKKYEQILKNALKFVEDNQGETEENYKFIYLKKRNNNEKNETIDAVKERYNIEFNEMYDKFLEKLSSKDYKNYINNKLYTNFLNSKEKFKKLKLWEKSLILREFLKIFNKNTYGKYEIKDSQTKEKLFSFPEDTGRIRLGQSSLGNNKELLEESVTGLFVKKIKL

SEQ ID NO: 18 - protein, 1084 aa, Corynebacterium diphtheriae
MKYHVGIDVGTFSVGLAAIEVDDAGMPIKTLSLVSHIHDSGLDPDEIKSAVTRLASSGIARRTRRLYRRKRRRLQQLDKFIQRQGWPVIELEDYSDPLYPWKVRAELAASYIADEKERGEKLSVALRHIARHRGWRNPYAKVSSLYLPDGPSDAFKAIREEIKRASGQPVPETATVGQMVTLCELGTLKLRGEGGVLSARLQQSDYAREIQEICRMQEIGQELYRKIIDVVFAAESPKGSASSRVGKDPLQPGKNRALKASDAFQRYRIAALIGNLRVRVDGEKRILSVEEKNLVFDHLVNLTPKKEPEWVTIAEILGIDRGQLIGTATMTDDGERAGARPPTHDTNRSIVNSRIAPLVDWWKTASALEQHAMVKALSNAEVDDFDSPEGAKVQAFFADLDDDVHAKLDSLHLPVGRAAYSEDTLVRLTRRMLSDGVDLYTARLQEFGIEPSWTPPTPRIGEPVGNPAVDRVLKTVSRWLESATKTWGAPERVIIEHVREGFVTEKRAREMDGDMRRRAARNAKLFQEMQEKLNVQGKPSRADLWRYQSVQRQNCQCAYCGSPITFSNSEMDHIVPRAGQGSTNTRENLVAVCHRCNQSKGNTPFAIWAKNTSIEGVSVKEAVERTRHWVTDTGMRSTDFKKFTKAVVERFQRATMDEEIDARSMESVAWMANELRSRVAQHFASHGTTVRVYRGSLTAEARRASGISGKLKFFDGVGKSRLDRRHHAIDAAVIAFTSDYVAETLAVRSNLKQSQAHRQEAPQWREFTGKDAEHRAAWRVWCQKMEKLSALLTEDLRDDRVVVMSNVRLRLGNGSAHKETIGKLSKVKLSSQLSVSDIDKASSEALWCALTREPGFDPKEGLPANPERHIRVNGTHVYAGDNIGLFPVSAGSIALRGGYAELGSSFHHARVYKITSGKKPAFAMLRVYTIDLLPYRNQDLFSVELKPQTMSMRQAEKKLRDALATGNAEYLGWLVVDDELVVDTSKIATDQVKAVEAELGTIRRWRVDGFFSPSKLRLRPLQMSKEGIKKESAPELSKIIDRPGWLPAVNKLFSDGNVTVVRRDSLGRVRLESTAHLPVTWKVQ

SEQ ID NO: 19 - protein, 1395 aa, Treponema denticola
MKKEIKDYFLGLDVGTGSVGWAVTDTDYKLLKANRKDLWGMRCFETAETAEVRRLHRGARRRIERRKKRIKLLQELFSQEIAKTDEGFFQRMKESPFYAEDKTILQENTLFNDKDFADKTYHKAYPTINHLIKAWIENKVKPDPRLLYLACHNIIKKRGHFLFEGDFDSENQFDTSIQALFEYLREDMEVDIDADSQKVKEILKDSSLKNSEKQSRLNKILGLKPSDKQKKAITNLISGNKINFADLYDNPDLKDAEKNSISFSKDDFDALSDDLASILGDSFELLLKAKAVYNCSVLSKVIGDEQYLSFAKVKIYEKHKTDLTKLKNVIKKHFPKDYKKVFGYNKNEKNNNNYSGYVGVCKTKSKKLIINNSVNQEDFYKFLKTILSAKSEIKEVNDILTEIETGTFLPKQISKSNAEIPYQLRKMELEKILSNAEKHFSFLKQKDEKGLSHSEKIIMLLTFKIPYYIGPINDNHKKFFPDRCWVVKKEKSPSGKTTPWNFFDHIDKEKTAEAFITSRTNFCTYLVGESVLPKSSLLYSEYTVLNEINNLQIIIDGKNICDIKLKQKIYEDLFKKYKKITQKQISTFIKHEGICNKTDEVIILGIDKECTSSLKSYIELKNIFGKQVDEISTKNMLEEIIRWATIYDEGEGKTILKTKIKAEYGKYCSDEQIKKILNLKFSGWGRLSRKFLETVTSEMPGFSEPVNIITAMRETQNNLMELLSSEFTFTENIKKINSGFEDAEKQFSYDGLVKPLFLSPSVKKMLWQTLKLVKEISHITQAPPKKIFIEMAKGAELEPARTKTRLKILQDLYNNCKNDADAFSSEIKDLSGKIENEDNLRLRSDKLYLYYTQLGKCMYCGKPIEIGHVFDTSNYDIDHIYPQSKIKDDSISNRVLVCSSCNKNKEDKYPLKSEIQSKQRGFWNFLQRNNFISLEKLNRLTRATPISDDETAKFIARQLVETRQATKVAAKVLEKMFPETKIVYSKAETVSMFRNKFDIVKCREINDFHHAHDAYLNIVVGNVYNTKFTNNPWNFIKEKRDNPKIADTYNYYKVFDYDVKRNNITAWEKGKTIITVKDMLKRNTPIYTRQAACKKGELFNQTIMKKGLGQHPLKKEGPFSNISKYGGYNKVSAAYYTLIEYEEKGNKIRSLETIPLYLVKDIQKDQDVLKSYLTDLLGKKEFKILVPKIKINSLLKINGFPCHITGKTNDSFLLRPAVQFCCSNNEVLYFKKIIRFSEIRSQREKIGKTISPYEDLSFRSYIKENLWKKTKNDEIGEKEFYDLLQKKNLEIYDMLLTKHKDTIYKKRPNSATIDILVKGKEKFKSLIIENQFEVILEILKLFSATRNVSDLQHIGGSKYSGVAKIGNKISSLDNCILIYQSITGIFEKRIDLLKV

SEQ ID NO: 20 - protein, 1334 aa, Listeria monocytogenes
MKNPYTIGLDIGTNSVGWAVLTNQYDLVKRKMKVAGNSDKKQIKKNFWGVRLFDDGQTAVDRRMNRTARRRIERRRNRISYLQEIFAVEMANIDANFFCRLNDSFYVDSEKRNSRHPFFATIEEEVAYHDNYRTIYHLREKLVNSSEKADLRLVYLALAHIIKYRGNFLIEGALDTKNTSVDEVYKQFIETYNQVFMSNIEEGALAKVEENIEVANILAGKFTRREKFERILQLYPGEKSTGMFAQFISLIVGSKGNFQKVFDLIEKTDIECAKDSYEEDLETLLAIIGDEYAELFVAAKNTYNAVVLSSIITVTDTETNAKLSASMIERFDAHEKDLVELKAFIKLNLPKQYEEIFSNAAIDGYAGYIDGKTKQVDFYKYLKTILENIEGSDYFIAKIEEENFLRKQRTFDNGAIPHQLHLEELEAIIHQQAKYYPFLKEDYDKIKSLVTFRIPYFVGPLANGQSEFAWLTRKADGEIRPWNIEEKVDFGKSAVDFIEKMTNKDTYLPKENVLPKHSLCYQKYMVYNELTKIRYIDDQGKTNYFSGREKQQVFNDLFKQKRKVKKKDLELFLRNINHIESPTIEGLEDSFNASYATYHDLLKVGMKQEILDNPLNTEMLEDIVKILTVFEDKPMIKEQLQQFSDVLDGGVLKKLERRHYTGWGRLSAKLLVGIREKQSHLTILDYLMNDDGLNRNLMQLINDSNLSFKSIIEKEQVSTTDKDLQSIVAELAGSPAIKKGILQSLKIVDELVSIMGYPPQTIVVEMARENQTTGKGKNNSKPRYKSLEKAIKEFGSQILKEHPTDNQELKNNRLYLYYLQNGKDMYTGQELDIHNLSNYDIDHIVPQSFITDNSIDNLVLTSSAGNREKGGDVPPLEIVRKRKVFWEKLYQGNLMSKRKFDYLTKAERGGLTEADKARFIHRQLVETRQITKNVANILYQRFNKETDNHGNTMEQVRIVTLKSALVSQFRKQFQLYKVREVNGYHHAHDAYLNGVVANTLLKVYPQLEPEFVYGEYHQFDWFKANKATAKKQFYTNIMLFFAQKERIIDENGEILWDKKYLETIKKVLDYRQMNIVKKTEIQKGEFSKATIKPKGNSSKLIPRKENWDPMKYGGLDSPNMAYAVIIEHAKGKKKIVIEKKLIQINIMERKMFEKDEEAFLEEKGYRHPKVLTKLPKYTLYECEKGRRRMLASANEAQKGNQLVLSNHLVSLLYHAKNCEASDGKSLKYIEAHRETFSELLAQVSEFATRYTLADANLSKINNLFEQNKEGDIKAIAQSFVDLMAFNAMGAPASFKFFEATIDRKRYTNLKELLSSTIIYQSITGLYESRKRLDD

SEQ ID NO: 21 - protein, 1236 aa, Mycoplasma mobile
MYFYKNKENKLNKKVVLGLDLGIASVGWCLTDISQKEDNKFPIILHGVRLFETVDDSDDKLLNETRRKKRGQRRRNRRLFTRKRDFIKYLIDNNIIELEFDKNPKILVRNFIEKYINPFSKNLELKYKSVTNLPIGFHNLRKAAINEKYKLDKSELIVLLYFYLSLRGAFFDNPEDTKSKEMNKNEIEIFDKNESIKNAEFPIDKIIEFYKISGKIRSTINLKFGHQDYLKEIKQVFEKQNIDFMNYEKFAMEEKSFFSRIRNYSEGPGNEKSFSKYGLYANENGNPELIINEKGQKIYTKIFKTLWESKIGKCSYDKKLYRAPKNSFSAKVFDITNKLTDWKHKNEYISERLKRKILLSRFLNKDSKSAVEKILKEENIKFENLSEIAYNKDDNKINLPIINAYHSLTTIFKKHLINFENYLISNENDLSKLMSFYKQQSEKLFVPNEKGSYEINQNNNVLHIFDAISNILNKFSTIQDRIRILEGYFEFSNLKKDVKSSEIYSEIAKLREFSGTSSLSFGAYYKFIPNLISEGSKNYSTISYEEKALQNQKNNFSHSNLFEKTWVEDLIASPTVKRSLRQTMNLLKEIFKYSEKNNLEIEKIVVEVTRSSNNKHERKKIEGINKYRKEKYEELKKVYDLPNENTTLLKKLWLLRQQQGYDAYSLRKIEANDVINKPWNYDIDHIVPRSISFDDSFSNLVIVNKLDNAKKSNDLSAKQFIEKIYGIEKLKEAKENWGNWYLRNANGKAFNDKGKFIKLYTIDNLDEFDNSDFINRNLSDTSYITNALVNHLTFSNSKYKYSVVSVNGKQTSNLRNQIAFVGIKNNKETEREWKRPEGFKSINSNDFLIREEGKNDVKDDVLIKDRSFNGHHAEDAYFITIISQYFRSFKRIERLNVNYRKETRELDDLEKNNIKFKEKASFDNFLLINALDELNEKLNQMRFSRMVITKKNTQLFNETLYSGKYDKGKNTIKKVEKLNLLDNRTDKIKKIEEFFDEDKLKENELTKLHIFNHDKNLYETLKIIWNEVKIEIKNKNLNEKNYFKYFVNKKLQEGKISFNEWVPILDNDFKIIRKIRYIKFSSEEKETDEIIFSQSNFLKIDQRQNFSFHNTLYWVQIWVYKNQKDQYCFISIDARNSKFEKDEIKINYEKLKTQKEKLQIINEEPILKINKGDLFENEEKELFYIVGRDEKPQKLEIKYILGKKIKDQKQIQKPVKKYFPNWKKVNLTYMGEIFKK

SEQ ID NO: 22 - protein, 1372 aa, Legionella pneumophila
MESSQILSPIGIDLGGKFTGVCLSHLEAFAELPNHANTKYSVILIDHNNFQLSQAQRRATRHRVRNKKRNQFVKRVALQLFQHILSRDLNAKEETALCHYLNNRGYTYVDTDLDEYIKDETTINLLKELLPSESEHNFIDWFLQKMQSSEFRKILVSKVEEKKDDKELKNAVKNIKNFITGFEKNSVEGHRHRKVYFENIKSDITKDNQLDSIKKKIPSVCLSNLLGHLSNLQWKNLHRYLAKNPKQFDEQTFGNEFLRMLKNFRHLKGSQESLAVRNLIQQLEQSQDYISILEKTPPEITIPPYEARTNTGMEKDQSLLLNPEKLNNLYPNWRNLIPGIIDAHPFLEKDLEHTKLRDRKRIISPSKQDEKRDSYILQRYLDLNKKIDKFKIKKQLSFLGQGKQLPANLIETQKEMETHFNSSLVSVLIQIASAYNKEREDAAQGIWFDNAFSLCELSNINPPRKQKILPLLVGAILSEDFINNKDKWAKFKIFWNTHKIGRTSLKSKCKEIEEARKNSGNAFKIDYEEALNHPEHSNNKALIKIIQTIPDIIQAIQSHLGHNDSQALIYHNPFSLSQLYTILETKRDGFHKNCVAVTCENYWRSQKTEIDPEISYASRLPADSVRPFDGVLARMMQRLAYEIAMAKWEQIKHIPDNSSLLIPIYLEQNRFEFEESFKKIKGSSSDKTLEQAIEKQNIQWEEKFQRIINASMNICPYKGASIGGQGEIDHIYPRSLSKKHFGVIFNSEVNLIYCSSQGNREKKEEHYLLEHLSPLYLKHQFGTDNVSDIKNFISQNVANIKKYISFHLLTPEQQKAARHALFLDYDDEAFKTITKFLMSQQKARVNGTQKFLGKQIMEFLSTLADSKQLQLEFSIKQITAEEVHDHRELLSKQEPKLVKSRQQSFPSHAIDATLTMSIGLKEFPQFSQELDNSWFINHLMPDEVHLNPVRSKEKYNKPNISSTPLFKDSLYAERFIPVWVKGETFAIGFSEKDLFEIKPSNKEKLFTLLKTYSTKNPGESLQELQAKSKAKWLYFPINKTLALEFLHHYFHKEIVTPDDTTVCHFINSLRYYTKKESITVKILKEPMPVLSVKFESSKKNVLGSFKHTIALPATKDWERLFNHPNFLALKANPAPNPKEFNEFIRKYFLSDNNPNSDIPNNGHNIKPQKHKAVRKVFSLPVIPGNAGTMMRIRRKDNKGQPLYQLQTIDDTPSMGIQINEDRLVKQEVLMDAYKTRNLSTIDGINNSEGQAYATFDNWLTLPVSTFKPEIIKLEMKPHSKTRRYIRITQSLADFIKTIDEALMIKPSDSIDDPLNMPNEIVCKNKLFGNELKPRDGKMKIVSTGKIVTYEFESDSTPQWIQTLYVTQLKKQP

SEQ ID NO: 23 - protein, 1122 aa, Streptococcus thermophilus
MSDLVLGLDIGIGSVGVGILNKVTGEIIHKNSRIFPAAQAENNLVRRTNRQGRRLTRRKKHRIVRLNRLFEESGLITDFTKISINLNPYQLRVKGLTDELSNEELFIALKNMVKHRGISYLDDASDDGNSSVGDYAQIVKENSKQLETKTPGQIQLERYQTYGQLRGDFTVEKDGKKHRLINVFPTSAYRSEALRILQTQQEFNSQITDEFINRYLEILTGKRKYYHGPGNEKSRTDYGRYRTNGETLDNIFGILIGKCTFYPDEFRAAKASYTAQEFNLLNDLNNLTVPTETKKLSKEQKNQIINYVKNEKVMGPAKLFKYIAKLLSCDVADIKGHRIDKSGKAEIHTFEAYRKMKTLETLDIEQMDRETLDKLAYVLTLNTEREGIQEALEHEFADGSFSQKQVDELVQFRKANSSIFGKGWHNFSVKLMMELIPELYETSEEQMTILTRLGKQKTTSSSNKTKYIDEKLLTEEIYNPVVAKSVRQAIKIVNAAIKEYGDFDNIVIEMARETNEDDEKKAIQKIQKANKDEKDAAMLKAANQYNGKAELPHSVFHGHKQLATKIRLWHQQGERCLYTGKTISIHDLINNPNQFEVDHILPLSITFDDSLANKVLVYATANQEKGQRTPYQALDSMDDAWSFRELKAFVRESKTLSNKKKEYLLTEEDISKFDVRKKFIERNLVDTRYASRVVLNALQEHFRAHKIDTKVSVVRGQFTSQLRRHWGIEKTRDTYHHHAVDALIIAASSQLNLWKKQKNTLVSYSEEQLLDIETGELISDDEYKESVFKAPYQHFVDTLKSKEFEDSILFSYQVDSKFNRKISDATIYATRQAKVGKDKKDETYVLGKIKDIYTQDGYDAFMKIYKKDKSKFLMYRHDPQTFEKVIEPILENYPNKEMNEKGKEVPCNPFLKYKEEHGYIRKYSKKGNGPEIKSLKYYDSKLLGNPIDITPENSKNKVVLQSLKPWRTDVYFNKNTGKYEILGLKYADLQFEKKTGTYKISQEKYNGIMKEEGVDSDSEFKFTLYKNDLLLVKDTETKEQQLFRFLSRTMPNVKYYVELKPYSKDKFEKNESLIEILGSADKSGRCIKGLGKSNISIYKVRTDVLGNQHIIKNEGDKPKLDF

SEQ ID NO: 24 - protein, 1128 aa, Streptococcus thermophilus
MSDLVLGLDIGIGSVGVGILNKVTGEIIHKNSRIFPAAQAENNLVRRTNRQGRRLTRRKKHRIVRLNRLFEESGLITDFTKISINLNPYQLRVKGLTDELSNEELFIALKNMVKHRGISYLDDASDDGNSSVGDYAQIVKENSKQLETKTPGQIQLERYQTYGQLRGDFTVEKDGKKHRLINVFPTSAYRSEALRILQTQQEFNPQITDEFINRYLEILTGKRKYYHGPGNEKSRTDYGRYRTSGETLDNIFGILIGKCTFYPEEFRAAKASYTAQEFNLLNDLNNLTVPTETKKLSKEQKNQIINYVKNEKAMGPAKLFKYIAKLLSCDVADIKGYRIDKSGKAEIHTFEAYRKMKTLETLDIEQMDRETLDKLAYVLTLNTEREGIQEALEHEFADGSFSQKQVDELVQFRKANSSIFGKGWHNFSVKLMMELIPELYETSEEQMTILTRLGKQKRLRLQIKQNISNKTKYIDEKLLTEEIYNPVVAKSVRQAIKIVNAAIKEYGDFDNIVIEMARETNEDDEKKAIQKIQKANKDEKDAAMLKAANQYNGKAELPHSVFHGHKQLATKIRLWHQQGERCLYTGKTISIHDLINNPNQFEVDHILPLSITFDDSLANKVLVYATANQEKGQRTPYQALDSMDDAWSFRELKAFVRESKTLSNKKKEYLLTEEDISKFDVRKKFIERNLVDTRYASRVVLNALQEHFRAHKIDTKVSVVRGQFTSQLRRHWGIEKTRDTYHHHAVDALIIAASSQLNLWKKQKNTLVSYSEEQLLDIETGELISDDEYKESVFKAPYQHFVDTLKSKEFEDSILFSYQVDSKFNRKISDATIYATRQAKVGKDKKDETYVLGKIKDIYTQDGYDAFMKIYKKDKSKFLMYRHDPQTFEKVIEPILENYPNKQMNEKGKEVPCNPFLKYKEEHGYIRKYSKKGNGPEIKSLKYYDSKLLGNPIDITPENSKNKVVLQSLKPWRTDVYFNKATGKYEILGLKYADLQFEKGTGTYKISQEKYNDIKKKEGVDSDSEFKFTLYKNDLLLVKDTETKEQQLFRFLSRTLPKQKHYVELKPYDKQKFEGGEALIKVLGNVANGGQCIKGLAKSNISIYKVRTDVLGNQHIIKNEGDKPKLDF

SEQ ID NO: 25 - protein, 1123 aa, Francisella tularensis
MNVKILPIAIDLDVKNTGVFSAFYQKGTSLEKLDNKNGKVYELSKDSYTLLMNNRTARRHKRRGIDRKQLVKRLFKLVWTEQLNLEWDKDTQQAISFLFNRRGFSFITDGYSTEYLNIVPEQVKAILMDIFDDYNGEDDLDSYLKLATEQESKISEIYNKLMQKILEFKLRKLCTDIKDDKVSTKTLKEITSYEFELLADYLANYSESLKTQKFSYTDKQGNLKELSYYHHDKYNIQEFLKRHATINDEILGTLLTDDFDIWNFNFEKFDFDKNEEKLQNQEDKDHTQAHLHHFVFVVNKIKSEMASGGRHRSQYFQEITNVLDENNHQEGYLKNFCENLHNKKYSNLSVKNLVNLVGNLSNLELKPLRKYFNDKIHAKADHWDEQKFTETYCHWILGEWRVGVKDQDKKDGAKYSYKDLCNELKQKVTKAGLIDFLLELDPCRTIPPYLDNNNRKPPKCQSLILNPKFLDNQYPNWQQYLQELKKLQSIQDYLDSFETDLKDLKSSKDQPYFVEYKSSNQQMASGQRDYKDLDARILQFIFDRVKASDELLLNEIYFQAKKLKQKASSELEKLESSKKLDEVIANSQLSQILKSQHTNGIFEQGTFLHLVCKYYKQRQRARDSRLYIMPEYRYDKKLDKYNNTGRFDDNNQLLTYCNHKPRQKRYQLLNDLAGVLQVSRNQLLSSVEEWFQQAQRVGEISKSQDEQIFEWLKSFKIASYCKAAVEMQKQYRGTLKNAIQTAIFRQSENINKNKNTGNQQQALSENSKDVKSLTADEKKLLKLIENIAKASQKIGESLGLNDKQIKKFNSIYSFAQIQQIAFAKRKGNANTCAVCSADNAHRMQQIKITELVEDNKDNIILSAKAQRLPAIPTRIVDGAVKKMATILAKNIVDDNWQNIKQVLSAKHQLHIPIITESNAFEFEPALADVKGKSLKDRRKKALERISPENIFKDKNNRIKEFAKGISAYSGANLTDGDFDGAKEELDHIIPRSHKKYGTLNDEANLICVTRDDNKNIFAIDTSKWFEIETPSDLRDIGVATIQYKIDNNSRPKVRVKLDYVIDDDSKINYFMNHSLLKSRYPDKVLEILKQSTIIEFESSGFNKTIKEMLGMTLAGIYNETSNN

SEQ ID NO: 26 - protein, 1436 aa, Bacteroides fragilis
MKRILGLDLGTNSIGWALVNEAENKDERSSIVKLGVRVNPLTVDELTNFEKGKSITTNADRTLKRGMRRNLQRYKLRRETLTEVLKEHKLITEDTILSENGNRTTFETYRLRAKAVTEEISLEEFARVLLMINKKRGYKSSRKAKGVEEGTLIDGMDIARELYNNNLTPGELCLQLLDAGKKFLPDFYRSDLQNELDRIWEKQKEYYPEILTDVLKEELRGKKRDAVWAICAKYFVWKENYTEWNKEKGKTEQQEREHKLEGIYSKRKRDEAKRENLQWRVNGLKEKLSLEQLVIVFQEMNTQINNSSGYLGAISDRSKELYFNKQTVGQYQMEMLDKNPNASLRNMVFYRQDYLDEFNMLWEKQAVYHKELTEELKKEIRDIIIFYQRRLKSQKGLIGFCEFESRQIEVDIDGKKKIKTVGNRVISRSSPLFQEFKIWQILNNIEVTVVGKKRKRRKLKENYSALFEELNDAEQLELNGSRRLCQEEKELLAQELFIRDKMTKSEVLKLLFDNPQELDLNFKTIDGNKTGYALFQAYSKMIEMSGHEPVDFKKPVEKVVEYIKAVFDLLNWNTDILGFNSNEELDNQPYYKLWHLLYSFEGDNTPTGNGRLIQKMTELYGFEKEYATILANVSFQDDYGSLSAKAIHKILPHLKEGNRYDVACVYAGYRHSESSLTREEIANKVLKDRLMLLPKNSLHNPVVEKILNQMVNVINVIIDIYGKPDEIRVELARELKKNAKEREELTKSIAQTTKAHEEYKTLLQTEFGLTNVSRTDILRYKLYKELESCGYKTLYSNTYISREKLFSKEFDIEHIIPQARLFDDSFSNKTLEARSVNIEKGNKTAYDFVKEKFGESGADNSLEHYLNNIEDLFKSGKISKTKYNKLKMAEQDIPDGFIERDLRNTQYIAKKALSMLNEISHRVVATSGSVTDKLREDWQLIDVMKELNWEKYKALGLVEYFEDRDGRQIGRIKDWTKRNDHRHHAMDALTVAFTKDVFIQYFNNKNASLDPNANEHAIKNKYFQNGRAIAPMPLREFRAEAKKHLENTLISIKAKNKVITGNINKTRKKGGVNKNMQQTPRGQLHLETIYGSGKQYLTKEEKVNASFDMRKIGTVSKSAYRDALLKRLYENDNDPKKAFAGKNSLDKQPIWLDKEQMRKVPEKVKIVTLEAIYTIRKEISPDLKVDKVIDVGVRKILIDRLNEYGNDAKKAFSNLDKNPIWLNKEKGISIKRVTISGISNAQSLHVKKDKDGKPILDENGRNIPVDFVNTGNNHHVAVYYRPVIDKRGQLVVDEAGNPKYELEEVVVSFFEAVTRANLGLPIIDKDYKTTEGWQFLFSMKQNEYFVFPNEKTGFNPKEIDLLDVENYGLISPNLFRVQKFSLKNYVFRHHLETTIKDTSSILRGITWIDFRSSKGLDTIVKVRVNHIGQIVSVGEY

SEQ ID NO: 27 - protein, 1314 aa, Mycoplasma synoviae
MLRLYCANNLVLNNVQNLWKYLLLLIFDKKIIFLFKIKVILIRRYMENNNKEKIVIGFDLGVASVGWSIVNAETKEVIDLGVRLFSEPEKADYRRAKRTTRRLLRRKKFKREKFHKLILKNAEIFGLQSRNEILNVYKDQSSKYRNILKLKINALKEEIKPSELVWILRDYLQNRGYFYKNEKLTDEFVSNSFPSKKLHEHYEKYGFFRGSVKLDNKLDNKKDKAKEKDEEEESDAKKESEELIFSNKQWINEIVKVFENQSYLTESFKEEYLKLFNYVRPFNKGPGSKNSRTAYGVFSTDIDPETNKFKDYSNIWDKTIGKCSLFEEEIRAPKNLPSALIFNLQNEICTIKNEFTEFKNWWLNAEQKSEILKFVFTELFNWKDKKYSDKKFNKNLQDKIKKYLLNFALENFNLNEEILKNRDLENDTVLGLKGVKYYEKSNATADAALEFSSLKPLYVFIKFLKEKKLDLNYLLGLENTEILYFLDSIYLAISYSSDLKERNEWFKKLLKELYPKIKNNNLEIIENVEDIFEITDQEKFESFSKTHSLSREAFNHIIPLLLSNNEGKNYESLKHSNEELKKRTEKAELKAQQNQKYLKDNFLKEALVPLSVKTSVLQAIKIFNQIIKNFGKKYEISQVVIEMARELTKPNLEKLLNNATNSNIKILKEKLDQTEKFDDFTKKKFIDKIENSVVFRNKLFLWFEQDRKDPYTQLDIKINEIEDETEIDHVIPYSKSADDSWFNKLLVKKSTNQLKKNKTVWEYYQNESDPEAKWNKFVAWAKRIYLVQKSDKESKDNSEKNSIFKNKKPNLKFKNITKKLFDPYKDLGFLARNLNDTRYATKVFRDQLNNYSKHHSKDDENKLFKVVCMNGSITSFLRKSMWRKNEEQVYRFNFWKKDRDQFFHHAVDASIIAIFSLLTKTLYNKLRVYESYDVQRREDGVYLINKETGEVKKADKDYWKDQHNFLKIRENAIEIKNVLNNVDFQNQVRYSRKANTKLNTQLFNETLYGVKEFENNFYKLEKVNLFSRKDLRKFILEDLNEESEKNKKNENGSRKRILTEKYIVDEILQILENEEFKDSKSDINALNKYMDSLPSKFSEFFSQDFINKCKKENSLILTFDAIKHNDPKKVIKIKNLKFFREDATLKNKQAVHKDSKNQIKSFYESYKCVGFIWLKNKNDLEESIFVPINSRVIHFGDKDKDIFDFDSYNKEKLLNEINLKRPENKKFNSINEIEFVKFVKPGALLLNFENQQIYYISTLESSSLRAKIKLLNKMDKGKAVSMKKITNPDEYKIIEHVNPLGINLNWTKKLENNN

SEQ ID NO: 28 - protein, 1368 aa, Streptococcus pyogenes
MDKKYSIGLDIGTNSVGWAVITDDYKVPSKKFKVLGNTDRHSIKKNLIGALLFDSGETAEATRLKRTARRRYTRRKNRICYLQEIFSNEMAKVDDSFFHRLEESFLVEEDKKHERHPIFGNIVDEVAYHEKYPTIYHLRKKLVDSTDKADLRLIYLALAHMIKFRGHFLIEGDLNPDNSDVDKLFIQLVQTYNQLFEENPINASGVDAKAILSARLSKSRRLENLIAQLPGEKKNGLFGNLIALSLGLTPNFKSNFDLAEDAKLQLSKDTYDDDLDNLLAQIGDQYADLFLAAKNLSDAILLSDILRLNSEITKAPLSASMIKRYDEHHQDLTLLKALVRQQLPEKYKEIFFDQSKNGYAGYIDGGASQEEFYKFIKPILEKMDGTEELLAKLNREDLLRKQRTFDNGSIPHQIHLGELHAILRRQEDFYPFLKDNREKIEKILTFRIPYYVGPLARGNSRFAWMTRKSEETITPWNFEEVVDKGASAQSFIERMTNFDKNLPNEKVLPKHSLLYEYFTVYNELTKVKYVTEGMRKPAFLSGEQKKAIVDLLFKTNRKVTVKQLKEDYFKKIECFDSVEISGVEDRFNASLGTYHDLLKIIKDKDFLDNEENEDILEDIVLTLTLFEDREMIEERLKTYAHLFDDKVMKQLKRRRYTGWGRLSRKLINGIRDKQSGKTILDFLKSDGFANRNFMQLIHDDSLTFKEDIQKAQVSGQGDSLHEHIANLAGSPAIKKGILQTVKVVDELVKVMGRHKPENIVIEMARENQTTQKGQKNSRERMKRIEEGIKELGSQILKEHPVENTQLQNEKLYLYYLQNGRDMYVDQELDINRLSDYDVDHIVPQSFIKDDSIDNKVLTRSDKNRGKSNNVPSEEVVKKMKNYWRQLLNAKLITQRKFDNLTKAERGGLSELDKAGFIKRQLVETRQITKHVAQILDSRMNTKYDENDKLIREVKVITLKSKLVSDFRKDFQFYKVREINNYHHAHDAYLNAVVGTALIKKYPKLESEFVYGDYKVYDVRKMIAKSEQEIGKATAKYFFYSNIMNFFKTEITLANGEIRKRPLIETNGETGEIVWDKGRDFATVRKVLSMPQVNIVKKTEVQTGGFSKESILPKRNSDKLIARKKDWDPKKYGGFDSPTVAYSVLVVAKVEKGKSKKLKSVKELLGITIMERSSFEKNPIDFLEAKGYKEVRKDLIVKLPKYSLFELENGRKRMLASAGELQKGNELALPSKYVNFLYLASHYEKLKGSPEDNEQKQLFVEQHKHYLDEIIEQISEFSKRVILADANLDKVLSAYNKHRDKPIREQAENIIHLFTLTNLGAPAAFKYFDTTIDRKRYTSTKEVLDATFIHQSITGLYETRIDLSQLGGD

SEQ ID NO: 29 - protein, 1368 aa, Streptococcus pyogenes
MDKKYSIGLDIGTNSVGWAVITDDYKVPSKKFKVLGNTDRHSIKKNLIGALLFDSGETAEATRLKRTARRRYTRRKNRICYLQEIFSNEMAKVDDSFFHRLEESFLVEEDKKHERHPIFGNIVDEVAYHEKYPTIYHLRKKLVDSTDKADLRLIYLALAHMIKFRGHFLIEGDLNPDNSDVDKLFIQLVQTYNQLFEENPINASGVDAKAILSARLSKSRRLENLIAQLPGEKKNGLFGNLIALSLGLTPNFKSNFDLAEDAKLQLSKDTYDDDLDNLLAQIGDQYADLFLAAKNLSDAILLSDILRVNTEITKAPLSASMIKRYDEHHQDLTLLKALVRQQLPEKYKEIFFDQSKNGYAGYIDGGASQEEFYKFIKPILEKMDGTEELLVKLNREDLLRKQRTFDNGSIPHQIHLGELHAILRRQEDFYPFLKDNREKIEKILTFRIPYYVGPLARGNSRFAWMTRKSEETITPWNFEEVVDKGASAQSFIERMTNFDKNLPNEKVLPKHSLLYEYFTVYNELTKVKYVTEGMRKPAFLSGEQKKAIVDLLFKTNRKVTVKQLKEDYFKKIECFDSVEISGVEDRFNASLGTYHDLLKIIKDKDFLDNEENEDILEDIVLTLTLFEDREMIEERLKTYAHLFDDKVMKQLKRRRYTGWGRLSRKLINGIRDKQSGKTILDFLKSDGFANRNFMQLIHDDSLTFKEDIQKAQVSGQGDSLHEHIANLAGSPAIKKGILQTVKVVDELVKVMGRHKPENIVIEMARENQTTQKGQKNSRERMKRIEEGIKELGSQILKEHPVENTQLQNEKLYLYYLQNGRDMYVDQELDINRLSDYDVDHIVPQSFLKDDSIDNKVLTRSDKNRGKSDNVPSEEVVKKMKNYWRQLLNAKLITQRKFDNLTKAERGGLSELDKAGFIKRQLVETRQITKHVAQILDSRMNTKYDENDKLIREVKVITLKSKLVSDFRKDFQFYKVREINNYHHAHDAYLNAVVGTALIKKYPKLESEFVYGDYKVYDVRKMIAKSEQEIGKATAKYFFYSNIMNFFKTEITLANGEIRKRPLIETNGETGEIVWDKGRDFATVRKVLSMPQVNIVKKTEVQTGGFSKESILPKRNSDKLIARKKDWDPKKYGGFDSPTVAYSVLVVAKVEKGKSKKLKSVKELLGITIMERSSFEKNPIDFLEAKGYKEVKKDLIIKLPKYSLFELENGRKRMLASAGELQKGNELALPSKYVNFLYLASHYEKLKGSPEDNEQKQLFVEQHKHYLDEIIEQISEFSKRVILADANLDKVLSAYNKHRDKPIREQAENIIHLFTLTNLGAPAAFKYFDTTIDRKRYTSTKEVLDATLIHQSITGLYETRIDLSQLGGD

SEQ ID NO: 30 - protein, 1370 aa, Streptococcus agalactiae; identical to SEQ ID NO: 11

SEQ ID NO: 31 - protein, 1173 aa, Rhodospirillum rubrum
MRPIEPWILGLDIGTDSLGWAVFSCEEKGPPTAKELLGGGVRLFDSGRDAKDHTSRQAERGAFRRARRQTRTWPWRRDRLIALFQAAGLTPPAAETRQIALALRREAVSRPLAPDALWAALLHLAHHRGFRSNRIDKRERAAAKALAKAKPAKATAKATAPAKEADDEAGFWEGAEAALRQRMAASGAPTVGALLADDLDRGQPVRMRYNQSDRDGVVAPTRALIAEELAEIVARQSSAYPGLDWPAVTRLVLDQRPLRSKGAGPCAFLPGEDRALRALPTVQDFIIRQTLANLRLPSTSADEPRPLTDEEHAKALALLSTARFVEWPALRRALGLKRGVKFTAETERNGAKQAARGTAGNLTEAILAPLIPGWSGWDLDRKDRVFSDLWAARQDRSALLALIGDPRGPTRVTEDETAEAVADAIQIVLPTGRASLSAKAARAIAQAMAPGIGYDEAVTLALGLHHSHRPRQERLARLPYYAAALPDVGLDGDPVGPPPAEDDGAAAEAYYGRIGNISVHIALNETRKIVNALLHRHGPILRLVMVETTRELKAGADERKRMIAEQAERERENAEIDVELRKSDRWMANARERRQRVRLARRQNNLCPYTSTPIGHADLLGDAYDIDHVIPLARGGRDSLDNMVLCQSDANKTKGDKTPWEAFHDKPGWIAQRDDFLARLDPQTAKALAWRFADDAGERVARKSAEDEDQGFLPRQLTDTGYIARVALRYLSLVTNEPNAVVATNGRLTGLLRLAWDITPGPAPRDLLPTPRDALRDDTAARRFLDGLTPPPLAKAVEGAVQARLAALGRSRVADAGLADALGLTLASLGGGGKNRADHRHHFIDAAMIAVTTRGLINQINQASGAGRILDLRKWPRTNFEPPYPTFRAEVMKQWDHIHPSIRPAHRDGGSLHAATVFGVRNRPDARVLVQRKPVEKLFLDANAKPLPADKIAEIIDGFASPRMAKRFKALLARYQAAHPEVPPALAALAVARDPAFGPRGMTANTVIAGRSDGDGEDAGLITPFRANPKAAVRTMGNAVYEVWEIQVKGRPRWTHRVLTRFDRTQPAPPPPPENARLVMRLRRGDLVYWPLESGDRLFLVKKMAVDGRLALWPARLATGKATALYAQLSCPNINLNGDQGYCVQSAEGIRKEKIRTTSCTALGRLRLSKKAT

SEQ ID NO: 32 - protein, 997 aa, Maritimibacter alkaliphilus
MKVLVDAGLMPSDPAAAKALETLDPYELRATGLDVMLPLTHLGRAVFHLNQRRGFKSNRKTDRGDNESGKIKDATKRLTWAMQEAGARTYGEFLHMRRARASDPRQVPSVRTRLSVASRGGPDSKEEAGYDFYPERAHLEDEFHALWSAQAAFHPDLTCELRDVVFEKIFYQRPLKEPKVGLCLFTAEERLPKAHPLTGRRVLYETVNQLRVTADGRTTRPLTLEERDMIVYALDNKKPVKSLSSMHLKLVALGKLVKLKDGERFTLESGVRDAIACDPIRATMGHPDGFGPAWSRLDWQAQWALIEKLRQVQSDDDFASLVAWLGATHNLSEDHAKRVANLHLPEGYGRLGLTATEAILCNLKAEVCTYSQAVERWGKHHSNQRTGECLEALPYYGEVLDRHVIPGTYNEDDDDVTRYGRITNPTVHIGLNQLRRLVNRIIATYGKPDQIVVELARELKQSEAQKSEALKKIRDTTADAIRRGRQLEEIGQKNTGANRLLLRLWEDLGPAVGPRCCPYTGKPISVTMLFDGACDVDHILPYSRTLDDSFANRTICLREANRQKGDRTPWEAWGGSDQWDAIEANLKDLPENKRKRFAPDAMERFEGERDFLDRALVDTQYLARISRAYLDTLFTEGGHVWVVPGRMTEMLRRHWGLNALLSDKDRGAGKVKNRTDHRHHAIDAAVIAATDHSLVNRISKAAGQGESAGQSAELIARDTPEPWEGFRNDISAQIARIVVSHRADHGRIDVEGRKHGKDSTAGRLHNDTAYGIVDDHTVVSRTPLLSLKPGDIEVTTKGKNIRDTQLQKALSVATTGKDGKGFEEALRNFAEKEGPYQGIRRVRLIETLQSSARVEVGSDEDGQPLKAYKGDSNHCYDLWKLPDGKVVPHVVSTYEAHAGTDKRPHPAAKRILRVFKKDMVAIEQDDQTAIFYVQKLDRANGLFLAPHLEANADARHRNPNDAFKFLQMGAGSVVRNKLRRVYVDEIGRIKDPGPPKH

SEQ ID NO: 33 - protein, 1027 aa, Blastopirellula marina
MFSESGDQPSLVDCGVRIFPEGVERDQQGGEKSKSQSRRVARGIRRQVRRRAQRLRHLKHALITTGLFPADVVDQQEVLASNPYELRSRALSEKLEPYEIGRILLHLAKRRGFLSNRTTDRSGGNELKGILAEMTQLQGEIAAHGCQTLGQYLHQLGDDGETFAQRLRGRHTLRAMYEDEFEKIWERQASYYPALLTEELRGGEEGKQSYPLVPTARRKSESLLKRFGLHGLLFFQRKMYWPKSVIGRCDLEPKEKRCPKADRLAQRFRILQEVNNLRLISPADRKEYTFAEFVGAGADKKLVDYLCEAKERTFPQIRKKFKLPETISFNYERGERSKLQGHETDAHFNGKKGLGKRRWSEIAEDVKDHIIQIVLEEDREDVALRKLTQDCSLTVEEAHKAMALHLPAGYSQYSRVAISRLLPHLELGKLLMGNDASDSAMHAAGYLRPDEREVRQYDLLPEPPDIPNPLVRQALYEVRKVINAIIREYGALGTIRVELAREAKKSAEQRTQIRIANAKRERENAAIAKTLQEMSPAIRPTRRNIQRYLLWKDQGGVCIYTGKVISQAQLFDSGEVDVDHILPRWRSLDDSMANKVIAHRSANNEKGDRTPWEWLGHDKPRFDELLLRAQRLPYGKRQRFIQKEVELTNFVERQLRDTTYVSRLVVQYLKGLGVPITTVKGPMTAELRHHWGLNALLNEDGSQKKNRSDHRHHAIDAIVIGLTDAKRLHALANARGKDLQPPWSEFRSDVATALGRMAVSHRVRRRIQGALHEETIYGPTQKAAQPTSTDQRPWAKDWIEDSQIVVRRKSVSDLTNTKHLAKIRDVTIRKILEDHLRRQKVDPTKPGVIPKDAFAGSNAPQMPSGVPIKKVRLVERGETWRKIGSGEASKFIKPGSNHHISYFAISRKGRESWKAHVTIMLDAACIAKESINNGKIVNRSIGDQGRFLMSLSIGEMFEITNNGGEILLCVVRKIDQSGRIYYKIHDDARESMDLKKDNLYMSPSKMQQFDARKVTVTPLGKIRNAND

SEQ ID NO: 34 - protein, 158 aa, Francisella tularensis
MIDFLLELDPCITIPPYLDNNNRKPPKCQSLILNPKFLDNQYPNWQQYLQELKKLQSIQDYLDSFETDLKDLKSSKDQPYFVEYKSSNQQMASGQRDYKDLDARILQFIFDRVKASDELLLSEIYFQAKKLKQKASSELEKLESSKKLDEVIANSQLS

SEQ ID NO: 35 - protein, 393 aa, Francisella tularensis
MNVKILPIAIDLDVKNTGVFSAFYQKGTSLEKLDNKNGKVYELSKDSYTLLMNNRTAQRHQRRGIDRKQLVKRLFKLVWTEQLNLEWDKDTQQAISFLFNRRGFSFITDGYSTEYLNIVPEQVKAILMDIFDDYNGEDDLDSYLKLATEQESKISEIYNKLMQKILEFKLRKLCTDIKDDKVSTKTLKEITSYEFELLADYLANYSESLKTQKFSYTDKQGNLKELSYYHHDKYNIQEFLKRHATINDEILDTLLTDDFDIWNFNFEKFDFDKNEEKLQSQEDKDHTQAYFHHFVFAVNKIKSEMASGGRHRSQYFQEITNVLDENNHQEGYLKNFCENLHNKKYSNLSVKNLVNLVGNLSNLELKPLRKYFNDKNLIIGMSKSLQKLIATGY

SEQ ID NO: 36 - protein, 1066 aa, Rhodopseudomonas palustris
MSERVVRRILGIDLGIASCGWGVVDISGAGGGIIATGVRCFDAPLIDKTGEPKSATRRTARGQRRIVRRRRQRMNGVRRLLCEFGLLPDPRPDALNQAMRRISTASAAAQVTPWTLRAAAHQRLLSNEELAVVLGHIARHRGFRSNAKNEAGANAADETSKMKKAMEATREGLAKYHAFGDMIANDPKFANRKRNRDKDYSHTAKRSDLEDEVRAILRAQLRFGSAAATETLAQTFADVAFFQRPLQDSEDRVGDCPFEPGQKRAARRAPSFELFRFLSRLANLKLAVGRSPERRLTAEEIALAAKGFGETKKTITFKSLREALDLDPNARFSGIGKDKEASLDVVARTGGAAYGTKTLKDALGDAPWRSLSRTPETLDRIAEILSFREDITSIRNGLEDLGLDSLVVEALMQAAANGDFKEFTRAGHISARAARNIIPGLREGLVYSEACARVGYDHAARLSVPLDQVGSPVTRKALSEALKQVRAVAREYGPIDYFHIELARSVGKSAEERKQLTDGIEARNVEKAKRRKQAEEHLGRAPSDDELLRYELAKEQNFKCIYSGDAIDPAGVAANDTRYQVDHILPWSRFGDDSYLNKTLCTARSNQNKRGRTPFEWFEADKTDVEWMEYVARVENLQEVKGRKKRNYSIKDAAAIEDKFKARNLTDTQWATRLLADELSRMFPPRECERAICGRADGGNDGLTIVEERRVFTRPGAITSKLRRAWGLEGLKKQDGKRVEDDRHHAVDALVLAATTESLLQRLTVEVQRREREGRPDDIFHCAEPWRGFRADVRRTVYGSETMPGIFVSRAERRRARGKAHDATIKQIREIEGERLVFERKPVEKLTDKDLEKIPIPKPYGQVSDPKRLRDELVESLRAWIAAGKPKDRPPLSPKGDVIRKVRIQTNDKVSVEINGGTVDRGDMARVDVFRKKNKKAVWEYYVVPIYPHQIVALNDPPDRAVIAYAEDKDWKEIDSSYEFLWSLFGLSYVEISKANGECIDGYFRGLHRGTGAASVCKHISLGKDATVSGIGLKTLASFKKFTIDRLGRKFEIPREVRTWRGEACT

SEQ ID NO: 37 - protein, 1149 aa, Lactobacillus salivarius
MERYHIGLDIGTSSIGWAVIGDDFKIKRKKGKNLIGVRLFKEGDTAAERRGFRTQRRRLNRRKWRLKLLEEIFDPYMAEVDKYFFARLKESNLSPKDSNKKYLGSLLFPDISDSNFYDKYPTIYHLRRDLMEKDKKFDLREIYLAIHHIVKYRGNFLEKVPAKNYKNSGASIGFLLEEVNDLYGNIIGNEDVAILDNDKFEDVEKIILNDEIRNIDKQKNVGRLLVKDKKEKNIVTAFSKAIFGYKFNLEDLLLIESDEKNKLTFNDENIDDIFNELSHSLNDNQMDLLTKTREIYFKFKLNMIVPTGYTISESMIEKYEMHKAHLKMYKEFINTLNAKDRKILKNAYSDYINNEKAKAANAQENFYKTVKKTIKENDSDTAKKIIGLIDEGNFMPKQRTGENGVIPHQLHQIELDRIIENQAKYYPWLAEENPVEKNRKFAKYKLDELVTFRVPYYVGPLIDKTESNKNEKETKFAWMVRKAKGTITPWNFENLVDRTESANRFIKRMTSKDTYIIGEDVLPASSLLYEKYKVLNELNNIKVNKKKLDVEQKQHVYLDLFTTRKNVTKDDLATSLNCDVESITGLTDNKKFNSSLSSYIDLKAILGNIVDDYSKNEDLEKIIEYSTIFEDGNIYKEKLSEISWLTDEQIEKLSNIHFKGWGRLSKKLLTQITNENGERIIDTLWNTSNNFIQVISDESIQAKLAEINGEYANKYNLEDILDEAYTSPQNKKAIRQVMKVVEDIEKAMKCEPTSIAIEFTREKRKSKLTNTRYKKISETYEKITDELISEYELGKLQSELDSKVNNMRDRYYLYFMQLGRDMYTGEKMNIDELHQKYDIDHILPQSFIKDDSLNNRVLTSKSVNIKEKSDKTAADLYAAKMGDFWRKLRKQGLMTEQKYKNLLTRTDSINKYTKQSFIKRQLVETSQVVKLAANILQDKYRNTKIIEIRARLNSDLRKKYELIKNREVNDYHHAIDGYLTTFVGQYLYKVYPKLRSYFVYDDFKKLDSNYLKHMDKFNFIWKLEDKKAEDVYDKVNDEFVLNVPEMKEYIRKIYNYKYMLVSKEVTTKNGAFYDQTKYNAKTINLIPIKKDKPTNIYGGYKGKVSSYMMLVKIQKKKEVIYKFVGVPRLWTDELDRLIDTDEKKALLKK

SEQ ID NO: 38 - protein, 1064 aa, Rhodopseudomonas palustris
MSECVTRRILGIDLGIASCGWGVIEVGEASGSIIASGVRCFDAPLIDKTGEPKSATRRTARGQRRIIRRRRQRMNAVRRLLAEFGVLTGRSPDALHQALLRLSQSVAGSQVTPWTLRAAAHERKLTNDELAVVLGHIARHRGFRSNSKNDGGANAADETSKMKKAMETTREGLARYHSFGAMIASDPKFADRKRNRDKDYSHTAKRSDLEDEVRTIFRSQTRFGSLVASEKLSQAFADAAFFQRPLQDSEDMVGSCPFEPGQKRTARRAPSFELFRFLSRLANLKLTVGRAPERRLTPDEIALAAKGFGETKKSITFKSLREALDLDPNARFSGVAKEKESTLDVAARTGGAAYGTKTLKDALGDAPWRSLSRMPEKLDRIAEILSFREDMKAIRNGLEEVGLDGLVVDALMQATANGDFKDFTRAAHISALAARNIIPGLREGLVYSDACTRVGYDHAARPAVPLSQIGSPVTRKALSEALKQVRAVAREYGPIDYFHIELARSIGKSAEERKKLTDGIEARNVEKEKRRKEAAEHLGRAPSDDELLRYELAKEQNFKCIYSGDPIDPAGISANDTRYQVDHILPWSRFGDDSYVNKTLCTARSNQNKRGRTPFEWFDADKTEAEWMEYSARVEDLKEVKGRKKRNYSIKDAASVEDKFKARNLTDTQWATRLLADELKRMFPPRECERVVTVRADGGNDGLSIVEERRVFTRPGAITSKLRRAWGLEGLKKQDGKRVEDDRHHAVDALVLAATTESLLNRLTVEVQQREREGRQDDIFHCSQPWPGFRVDVQRTVYGSETMPGIFVSRAERRRARGKAHDATVKQIRDIDGERIVFERKPIEKLTDKDLERIPVPEPYGKAADPKKLRDELVENLRAWIAAGKPKDKPPRSPKGDIIRKVRIETKDKVAVEINGGTVDRGDMARVDVFRKKNKKGVWEFYVIPIYPHQIVASALPPNRAVIAYKAESEWTAIDGCFEFAWSLNPMSYLELVKSNGELIEGYFRSMDRTTGAINLSPMSTNSETIRSIGVKTLSSFRKFTVDRLGRKFEIPREVRTWRGEACT

SEQ ID NO: 39 - protein, 1166 aa, Nitrobacter hamburgensis
MHVEIDFPHFSRGDSHLAMNKNEILRGSSVLYRLGLDLGSNSLGWFVTHLEKRGDRHEPVALGPGGVRIFPDGRDPQSGTSNAVDRRMARGARKRRDRFVERRKELIAALIKYNLLPDDARERRALEVLDPYALRKTALTDTLPAHHVGRALFHLNQRRGFQSNRKTDSKQSEDGAIKQAASRLATDKGNETLGVFFADMHLRKSYEDRQTAIRAELVRLGKDHLTGNARKKIWAKVRKRLFGDEVLPRADAPHGVRARATITGTKASYDYYPTRDMLRDEFNAIWAGQSAHHATITDEARTEIEHIIFYQRPLKPAIVGKCTLDPATRPFKEDPEGYRAPWSHPLAQRFRILSEARNLEIRDTGKGSRRLTKEQSDLVVAALLANREVKFDKLRTLLKLPAEARFNLESDRRAALDGDQTAARLSDKKGFNKAWRGFPPERQIAIVARLEETEDENELIAWLEKECALDGAAAARVANTTLPDGHCRLGLRAIKKIVPIMQDGLDEDGVAGAGYHIAAKRAGYDHAKLPTGEQLGRLPYYGQWLQDAVVGSGDARDQKEKQYGQFPNPTVHIGLGQLRRVVNDLIDKYGPPTEISIEFTRALKLSEQQKAERQREQRRNQDKNKARAEELAKFGRPANPRNLLKMRLWEELAHDPLDRKCVYTGEQISIERLLSDEVDIDHILPVAMTLDDSPANKIICMRYANRHKRKQTPSEAFGSSPTLQGHRYNWDDIAARATGLPRNKRWRFDANAREEFDKRGGFLARQLNETGWLARLAKQYLGAVTDPNQIWVVPGRLTSMLRGKWGLNGLLPSDNYAGVQDKAEEFLASTDDMEFSGVKNRADHRHHAIDGLVTALTDRSLLWKMANAYDEEHEKFVIEPPWPTMRDDLKAALEKMVVSHKPDHGIEGKLHEDSAYGFVKPLDATGLKEEEAGNLVYRKAIESLNENEVDRIRDIQLRTIVRDHVNVEKTKGVALADALRQLQAPSDDYPQFKHGLRHVRILKKEKGDYLVPIANRASGVAYKAYSAGENFCVEVFETAGGKWDGEAVRRFDANKKNAGPKIAHAPQWRDANEGAKLVMRIHKGDLIRLDHEGRARIMVVHRLDAAAGRFKLADHNETGNLDKRHATNNDIDPFRWLMASYNTLKKLAAVPVRVDELGRVWRVMPN

SEQ ID NO: 40 - protein, 641 aa, Nitrobacter hamburgensis
MHKRNSRSYRLGLDLGSNSLGWFVTHLEKRGDRYEPVALDPGGVRIFPDGRDPQSGMSNAVDRRMARGARKRRDRFVDPYALRKAALTNALPAHRVGRAIFHLNQRRGFQSNRKTDRKQSEDGAIKQAASKLKARMHEEAAPTLGAFFADMHLRKSYDDQQTAIRAELVRLGKDHLTGNARKKVWAKVRKRLFGDEVLRPKDTSDGARARATTTGTKASYDFYPTRAMLLDEFNAIWAAQREHHLAMTDEAKAEIEHIIFYHRPLKPAIVGKCTLDPATRPFKEDPEGYRAPWSHPLAQRFRILSEARNLEIRETGKTSRRLTKDQSDLVVAALLANREVKFDKLRTLLKLPAEARFNLESDRRSTATRPPHGCRTRRASIRRGAGFLRNGRSRSSPDWKKPKTKTNCSHGSKWNAHLTAQRPRASPIRRCRTAIAGSACAQSKRSCRSCRTSSMRMALRAPAITSWPSVPATTIPVDTFQQGGNAFGRILSVVTIELFAITDRVDPVQEQDARCFALRIAECRSDGLQHFAEVSLGLPPRNAAQDQRHSAGLCQSSCVGRFVPGTPCRRTPRSTSLHGKEPSAHAFGSTARSRPQLPASPRPCMSFRDGTSSSPARMPETLDRCAISRSNRSSVCRAERL

SEQ ID NO: 41 - protein, 1368 aa, Streptococcus pyogenes
MDKKYSIGLDIGTNSVGWAVITDDYKVPSKKFKVLGNTDRHSIKKNLIGALLFDSGEIAEATRLKRTARRRYTRRKNRICYLQEIFSNEMAKVDDSFFHRLEESFLVEEDKKHERHPIFGNIVDEVAYHEKYPTIYHLRKKLVDSTDKADLRLIYLALAHMIKFRGHFLIEGDLNPDNSDVDKLFIQLVQTYNQLFEENPINASGVDAKAILSARLSKSRRLENLIAQLPGEKKNGLFGNLIALSLGLTPNFKSNFDLAEDAKLQLSKDTYDDDLDNLLAQIGDQYADLFLAAKNLSDAILLSDILRLNSEITKAPLSASMIKRYDEHHQDLTLLKALVRQQLPEKYKEIFFDQSKNGYAGYIDGGASQEEFYKFIKPILEKMDGTEELLAKLNREDLLRKQRTFDNGSIPHQIHLGELHAILRRQEDFYPFLKDNREKIEKILTFRIPYYVGPLARGNSRFAWMTRKSEETITPWNFEEVVDKGASAQSFIERMTNFDKNLPNEKVLPKHSLLYEYFTVYNELTKVKYVTEGMRKPAFLSGEQKKAIVDLLFKTNRKVTVKQLKEDYFKKIECFDSVEISGVEDRFNASLGTYHDLLKIIKDKDFLDNEENEDILEDIVLTLTLFEDREMIEERLKTYAHLFDDKVMKQLKRRRYTVWGRLSRKLINGIRDKQSGKTILDFLKSDGFANRNFMQLIHDDSLTFKEDIQKAQVSGQGDSLHEHIANLAGSPAIKKGILQTVKVVDELVKVMGRHKPENIVIEMARENQTTQKGQKNSRERMKRIEEGIKELGSQILKEHPVENTQLQNEKLYLYYLQNGRDMYVDQELDINRLSDYDVDHIVPQSFIKDDSIDNKVLTRSDKNRGKSDNVPSEEVVKKMKNYWRQLLNAKLITQRKFDNLTKAERGGLSELDKAGFIKRQLVETRQITKHVAQILDSRMNTKYDENDKLIREVKVITLKSKLVSDFRKDFQFYKVREINNYHHAHDAYLNAVVGTALIKKYPKLESEFVYGDYKVYDVRKMLAKSEQEIGKATAKYFFYSNIMNFFKTEITLANGEIRKRPLIETNGETGEIVWDKGRDFATVRKVLSMPQVNIVKKTEVQTGGFSKESILPKRNSDKLIARKKDWDPKKYGGFDSPTVAYSVLVVAKVEKGKSKKLKSVKELLGITIMERSSFEKNPIDFLEAKGYKEVRKDLIIKLPKYSLFELENGRKRMLASAGELQKGNELALPSKYVNFLYLASHYEKLKGSPEDNEQKQLFVEQHKHYLDEIIEQISEFSKRVILADANLDKVLSAYNKHRDKPIREQAENIIHLFTLTNLGAPTAFKYFDTTIDRKRYTSTKEVLDATFIHQSITGLYETRIDLSQLGGD

SEQ ID NO: 42 - protein, 1368 aa, Streptococcus pyogenes
MDKKYSIGLDIGTNSVGWAVITDDYKVPSKKFKVLGNTDRHSIKKNLIGALLFDSGETAEATRLKRTARRRYTRRKNRICYLQEIFSNEMAKVDDSFFHRLEESFLVEEDKKHERHPIFGNIVDEVAYHEKYPTIYHLRKKLVDSTDKADLRLIYLALAHMIKFRGHFLIEGDLNPDNSDVDKLFIQLVQTYNQLFEENPINASGVDAKAILSARLSKSRRLENLIAQLPGEKKNGLFGNLIALSLGLTPNFKSNFDLAEDAKLQLSKDTYDDDLDNLLAQIGDQYADLFLAAKNLSDAILLSDILRLNSEITKAPLSASMIKRYDEHHQDLTLLKALVRQQLPEKYKEIFFDQSKNGYAGYIDGGASQEEFYKFIKPILEKMDGTEELLAKLNREDLLRKQRTFDNGSIPHQIHLGELHAILRRQEDFYPFLKDNREKIEKILTFRIPYYVGPLARGNSRFAWMTRKSEETITPWNFEEVVDKGASAQSFIERMTNFDKNLPNEKVLPKHSLLYEYFTVYNELTKVKYVTEGMRKPAFLSGEQKKAIVDLLFKTNRKVTVKQLKEDYFKKIECFDSVEISGVEDRFNASLGTYHDLLKIIKDKDFLDNEENEDILEDIVLTLTLFEDREMIEERLKTYAHLFDDKVMKQLKRRRYTGWGRLSRKLINGIRDKQSGKTILDFLKSDGFANRNFMQLIHDDSLTFKEDIQKAQVSGQGDSLHEHIANLAGSPAIKKGILQTVKVVDELVKVMGRHKPENIVIEMARENQTTQKGQKNSRERMKRIEEGIKELGSQILKEHPVENTQLQNEKLYLYYLQNGRDMYVDQELDINRLSDYDVDHIVPQSFIKDDSIDNKVLTRSDKNRGKSDNVPSEEVVKKMKNYWRQLLNAKLITQRKFDNLTKAERGGLSELDKAGFIKRQLVETRQITKHVAQILDSRMNTKYDENDKLIREVKVITLKSKLVSDFRKDFQFYKVREINNYHHAHDAYLNAVVGTALIKKYPKLESEFVYGDYKVYDVRKMIAKSEQEIGKATAKYFFYSNIMNFFKTEITLANGEIRKRPLIETNGETGEIVWDKGRDFATVRKVLSMPQVNIVKKTEVQTGGFSKESILPKRNSDKLIARKKDWDPKKYGGFDSPTVAYSVLVVAKVEKGKSKKLKSVKELLGLTIMERSSFEKNPIDFLEAKGYKEVKKDLIIKLPKYSLFELENGRKRMLASAGELQKGNELALPSKYVNFLYLASHYEKLKGSPEDNEQKQLFVEQHKHYLDEIIEQISEFSKRVILADANLDKVLSAYNKHRDKPIREQAENIIHLFTLTNLGAPAAFKYFDTTIDRKRYTSTKEVLDATLIHQSITGLYETRIDLSQLGGD

SEQ ID NO: 43 - protein, 1368 aa, Streptococcus pyogenes
MDKKYSIGLDIGTNSVGWAVITDDYKVPSKKFKVLGNTDRHSIKKNLIGALLFDSGEIAEATRLKRTARRRYTRRKNRICYLQEIFSNEMAKVDDSFFHRLEESFLVEEDKKHERHPIFGNIVDEVAYHEKYPTIYHLRKKLVDSTDKADLRLIYLALAHMIKFRGHFLIEGDLNPDNSDVDKLFIQLVQTYNQLFEENPINASGVDAKAILSARLSKSRRLENLIAQLPGEKKNGLFGNLIALSLGLTPNFKSNFDLAEDAKLQLSKDTYDDDLDNLLAQIGDQYADLFLAAKNLSDAILLSDILRLNSEITKAPLSASMIKRYDEHHQDLTLLKALVRQQLPEKYKEIFFDQSKNGYAGYIDGGASQEEFYKFIKPILEKMDGTEELLAKLNREDLLRKQRTFDNGSIPHQIHLGELHAILRRQEDFYPFLKDNREKIEKILTFRIPYYVGPLARGNSRFAWMTRKSEETITPWNFEEVVDKGASAQSFIERMTNFDKNLPNEKVLPKHSLLYEYFTVYNELTKVKYVTEGMRKPAFLSGEQKKAIVDLLFKTNRKVTVKQLKEDYFKKIECFDSVEISGVEDRFNASLGTYHDLLKIIKDKDFLDNEENEDILEDIVLTLTLFEDREMIEERLKTYAHLFDDKVMKQLKRRRYTGWGRLSRKLINGIRDKQSGKTILDFLKSDGFANRNFMQLIHDDSLTFKEDIQKAQVSGQGDSLHEHIANLAGSPAIKKGILQTVKVVDELVKVMGRHKPENIVIEMARENQTTQKGQKNSRERMKRIEEGIKELGSQILKEHPVENTQLQNEKLYLYYLQNGRDMYVDQELDINRLSDYDVDHIVPQSFIKDDSIDNKVLTRSDKNRGKSDNVPSEEVVKKMKNYWRQLLNAKLITQRKFDNLTKAERGGLSELDKAGFIKRQLVETRQITKHVAQILDSRMNTKYDENDKLIREVKVITLKSKLVSDFRKDFQFYKVREINNYHHAHDAYLNAVVGTALIKKYPKLESEFVYGDYKVYDVRKMLAKSEQEIGKATAKYFFYSNIMNFFKTEITLANGEIRKRPLIETNGETGEIVWDKGRDFATVRKVLSMPQVNIVKKTEVQTGGFSKESILPKRNSDKLIARKKDWDPKKYGGFDSPTVAYSVLVVAKVEKGKSKKLKSVKELLGITIMERSSFEKNPIDFLEAKGYKEVRKDLIIKLPKYSLFELENGRKRMLASAGELQKGNELALPSKYVNFLYLASHYEKLKGSPEDNEQKQLFVEQHKHYLDEIIEQISEFSKRVILADANLDKVLSAYNKHRDKPIREQAENIIHLFTLTNLGAPTAFKYFDTTIDRKRYTSTKEVLDATFIHQSITGLYETRIDLSQLGGD

SEQ ID NO: 44 - protein, 1371 aa, Streptococcus pyogenes
MDKKYSIGLDIGTNSVGWAVITDDYKVPSKKFKVLGNTDRHSIKKNLIGALLFDSGETAEATRLKRTARRRYTRRKNRICYLQEIFSNEMAKVDDSFFHRLEESFLVEEDKKHERHPIFGNIVDEVAYHEKYPTIYHLRKKLADSTDKADLRLIYLALAHMIKFRGHFLIEGDLNPDNSDVDKLFIQLVQTYNQLFEENPINASRVDAKAILSARLSKSRRLENLIAQLPGEKKNGLFGNLIALSLGLTPNFKSNFDLAEDAKLQLSKDTYDDDLDNLLAQIGDQYADLFLAAKNLSDATLLSDILRVNSEITKAPLSASMIKRYDEHHQDLTLLKALVRQQLPEKYKEIFFDQSKNGYAGYIDGGASQEEFYKFIKPILEKMDGTEELLAKLNREDLLRKQRTFDNGSIPHQIHLGELHAILRRQEDFYPFLKDNREKIEKILTFRIPYYVGPLARGNSRFAWMTRKSEETITPWNFEEVVDKGASAQSFIERMTNFDKNLPNEKVLPKHSLLYEYFTVYNELTKVKYVTEGMRKPAFLSGEQKKAIVDLLFKTNRKVTVKQLKEDYFKKIECFDSVEISGVEDRFNASLGTYHDLLKIIKDKDFLDNEENEDILEDIVLTLTLFEDKEMIEERLKTYAHLFDDKVMKQLKRRHYTGWGRLSRKLINGIRDKQSGKTILDFLKSDGFANRNFIQLIHDDSLTFKEAIQKAQVSGQGHSLHEQIANLAGSPAIKKGILQSVKVVDELVKVMGHKPENIVIEMARENQTTQKGQKNSRERMKRIEEGIKELGSQILKEHPVENTQLQNEKLYLYYLQNGRDMYVDQELDINRLSDYDVDHIVPQSFIKDDSIDNKVLTRSDKNRGKSDDVPSEEVVKKMKNYWRQLLNAKLITQRKFDNLTKAERGGLSELDKAGFIKRQLVETRQITKHVAQILDSRMNTKYDENDKLIREVKVITLKSKLVSDFRKDFQFYKVREINNYHHAHDAYLNAVVGTALIKKYPKLESEFVYGDYKVYDVRKMIAKSEQEIGKATAKRFFYSNIMNFFKTEITLANGEIRKRPLIETNEETGEIVWDKGRDFATVRKVLSMPQVNIVKKTEVQTGALTNESIYARGSFDKLISRKHRFESSKYGGFGSPTVTYSVLVVAKSKVQDGKVKKIKTGKELIGITLLDKLVFEKNPLKFIEDKGYGNVQIDKCIKLPKYSLFEFENGTRRMLASVMANNNSRGDLQKANEMFLPAKLVTLLYHAHKIESSKELEHEAYILDHYNDLYQLLSYIERFASLYVDVEKNISKVKELFSNIESYSISEICSSVINLLTLTASGAPADFKFLGTTIPRKRYGSPQSILSSTLIHQSITGLYETRIDLSQLGSD

SEQ ID NO: 45 - protein, 1121 aa, Streptococcus thermophilus
MSDLVLGLDIGIGSVGVGILNKVTGEIIHKNSRIFPAAQAENNLVRRTNRQGRRLARRKKHRRVRLNRLFEESGLITDFTKISINLNPYQLRVKGLTDELSNEELFIALKNMVKHRGISYLDDASDDGNSSVGDYAQIVKENSKQLETKTPGQIQLERYQTYGQLRGDFTVEKDGKKHRLINVFPTSAYRSEALRILQTQQEFNPQITDEFINRYLEILTGKRKYYHGPGNEKSRTDYGRYRTSGETLDNIFGILIGKCTFYPDEFRAAKASYTAQEFNLLNDLNNLTVPTETKKLSKEQKNQIINYVKNEKAMGPAKLFKYIAKLLSCDVADIKGYRIDKSGKAEIHTFEAYRKMKTLETLDIEQMDRETLDKLAYVLTLNTEREGIQEALEHEFADGSFSQKQVDELVQFRKANSSIFGKGWHNFSVKLMMELIPELYETSEEQMTILTRLGKQKTTSSSNKTKYIDEKLLTEEIYNPVVAKSVRQAIKIVNAAIKEYGDFDNIVIEMARETNEDDEKKAIQKIQKANKDEKDAAMLKAANQYNGKAELPHSVFHGHKQLATKIRLWHQQGERCLYTGKTISIHDLINNSNQFEVDHILPLSITFDDSLANKVLVYATANQEKGQRTPYQALDSMDDAWSFRELKAFVRESKTLSNKKKEYLLTEEDISKFDVRKKFIERNLVDTRYASRVVLNALQEHFRAHKIDTKVSVVRGQFTSQLRRHWGIEKTRDTYHHHAVDALIIAASSQLNLWKKQKNTLVSYSEDQLLDIETGELISDDEYKESVFKAPYQHFVDTLKSKEFEDSILFSYQVDSKFNRKISDATIYATRQAKVGKDKADETYVLGKIKDIYTQDGYDAFMKIYKKDKSKFLMYRHDPQTFEKVIEPILENYPNKQINEKGKEVPCNPFLKYKEEHGYIRKYSKKGNGPEIKSLKYYDSKLGNHIDITPKDSNNKVVLQSVSPWRADVYFNKTTGKYEILGLKYADLQFEKGTGTYKISQEKYNDIKKKEGVDSDSEFKFTLYKNDLLLVKDTETKEQQLFRFLSRTMPKQKHYVELKPYDKQKFEGGEALIKVLGNVANSGQCKKGLGKSNISIYKVRTDVLGNQHIIKNEGDKPKLDF

SEQ ID NO: 46 - protein, 1388 aa, Streptococcus thermophilus
MTKPYSIGLDIGTNSVGWAVTTDNYKVPSKKMKVLGNTSKKYIKKNLLGVLLFDSGITAEGRRLKRTARRRYTRRRNRILYLQEIFSTEMATLDDAFFQRLDDSFLVPDDKRDSKYPIFGNLVEEKAYHDEFPTIYHLRKYLADSTKKADLRLVYLALAHMIKYRGHFLIEGEFNSKNNDIQKNFQDFLDTYNAIFESDLSLENSKQLEEIVKDKISKLEKKDRILKLFPGEKNSGIFSEFLKLIVGNQADFRKCFNLDEKASLHFSKESYDEDLETLLGYIGDDYSDVFLKAKKLYDAILLSGFLTVTDNETEAPLSSAMIKRYNEHKEDLALLKEYIRNISLKTYNEVFKDDTKNGYAGYIDGKTNQEDFYVYLKKLLAEFEGADYFLEKIDREDFLRKQRTFDNGSIPYQIHLQEMRAILDKQAKFYPFLAKNKERIEKILTFRIPYYVGPLARGNSDFAWSIRKRNEKITPWNFEDVIDKESSAEAFINRMTSFDLYLPEEKVLPKHSLLYETFNVYNELTKVRFIAESMRDYQFLDSKQKKDIVRLYFKDKRKVTDKDIIEYLHAIYGYDGIELKGIEKQFNSSLSTYHDLLNIINDKEFLDDSSNEAIIEEIIHTLTIFEDREMIKQRLSKFENIFDKSVLKKLSRRHYTGWGKLSAKLINGIRDEKSGNTILDYLIDDGISNRNFMQLIHDDALSFKKKIQKAQIIGDEDKGNIKEVVKSLPGSPAIKKGILQSIKIVDELVKVMGGRKPESIVVEMARENQYTNQGKSNSQQRLKRLEKSLKELGSKILKENIPAKLSKIDNNALQNDRLYLYYLQNGKDMYTGDDLDIDRLSNYDIDHIIPQAFLKDNSIDNKVLVSSASNRGKSDDVPSLEVVKKRKTFWYQLLKSKLISQRKFDNLTKAERGGLSPEDKAGFIQRQLVETRQITKHVARLLDEKFNNKKDENNRAVRTVKIITLKSTLVSQFRKDFELYKVREINDFHHAHDAYLNAVVASALLKKYPKLEPEFVYGDYPKYNSFRERKSATEKVYFYSNIMNIFKKSISLADGRVIERPLIEVNEETGESVWNKESDLATVRRVLSYPQVNVVKKVEEQNHGLDRGKPKGLFNANLSSKPKPNSNENLVGAKEYLDPKKYGGYAGISNSFTVLVKGTIEKGAKKKITNVLEFQGISILDRINYRKDKLNFLLEKGYKDIELIIELPKYSLFELSDGSRRMLASILSTNNKRGEIHKGNQIFLSQKFVKLLYHAKRISNTINENHRKYVENHKKEFEELFYYILEFNENYVGAKKNGKLLNSAFQSWQNHSIDELCSSFIGPTGSERKGLFELTSRGSAADFEFLGVKIPRYRDYTPSSLLKDATLIHQSVTGLYETRIDLAKLGEG

SEQ ID NO: 47 - protein, 1138 aa, Acidothermus cellulolyticus
MGGSEVGTVPVTWRLGVDVGERSIGLAAVSYEEDKPKEILAAVSWIHDGGVGDERSGASRLALRGMARRARRLRRFRRARLRDLDMLLSELGWTPLPDKNVSPVDAWLARKRLAEEYVVDETERRRLLGYAVSHMARHRGWRNPWTTIKDLKNLPQPSDSWERTRESLEARYSVSLEPGTVGQWAGYLLQRAPGIRLNPTQQSAGRRAELSNATAFETRLRQEDVLWELRCIADVQGLPEDVVSNVIDAVFCQKRPSVPAERIGRDPLDPSQLRASRACLEFQEYRIVAAVANLRIRDGSGSRPLSLEERNAVIEALLAQTERSLTWSDIALEILKLPNESDLTSVPEEDGPSSLAYSQFAPFDETSARIAEFIAKNRRKIPTFAQWWQEQDRTSRSDLVAALADNSIAGEEEQELLVHLPDAELEALEGLALPSGRVAYSRLTLSGLTRVMRDDGVDVHNARKTCFGVDDNWRPPLPALHEATGHPVVDRNLAILRKFLSSATMRWGPPQSIVVELARGASESRERQAEEEAARRAHRKANDRIRAELRASGLSDPSPADLVRARLLELYDCHCMYCGAPISWENSELDHIVPRTDGGSNRHENLAITCGACNKEKGRRPFASWAETSNRVQLRDVIDRVQKLKYSGNMYWTRDEFSRYKKSVVARLKRRTSDPEVIQSIESTGYAAVALRDRLLSYGEKNGVAQVAVFRGGVTAEARRWLDISIERLFSRVAIFAQSTSTKRLDRRHHAVDAVVLTTLTPGVAKTLADARSRRVSAEFWRRPSDVNRHSTEEPQSPAYRQWKESCSGLGDLLISTAARDSIAVAAPLRLRPTGALHEETLRAFSEHTVGAAWKGAELRRIVEPEVYAAFLALTDPGGRFLKVSPSEDVLPADENRHIVLSDRVLGPRDRVKLFPDDRGSIRVRGGAAYIASFHHARVFRWGSSHSPSFALLRVSLADLAVAGLLRDGVDVFTAELPPWTPAWRYASIALVKAVESGDAKQVGWLVPGDELDFGPEGVTTAAGDLSMFLKYFPERHWVVTGFEDDKRINLKPAFLSAEQAEVLRTERSDRPDTLTEAGEILAQFFPRCWRATVAKVLCHPGLTVIRRTALGQPRWRRGHLPYSWRPWSADPWSGGTP

SEQ ID NO: 48 - protein, 1629 aa, Francisella novicida
MNFKILPIAIDLGVKNTGVFSAFYQKGTSLERLDNKNGKVYELSKDSYTLLMNNRTARRHQRRGIDRKQLVKRLFKLIWTEQLNLEWDKDTQQAISFLFNRRGFSFITDGYSPEYLNIVPEQVKAILMDIFDDYNGEDDLDSYLKLATEQESKISEIYNKLMQKILEFKLMKLCTDIKDDKVSTKTLKEITSYEFELLADYLANYSESLKTQKFSYTDKQGNLKELSYYHHDKYNIQEFLKRHATINDRILDTLLTDDLDIWNFNFEKFDFDKNEEKLQNQEDKDHIQAHLHHFVFAVNKIKSEMASGGRHRSQYFQEITNVLDENNHQEGYLKNFCENLHNKKYSNLSVKNLVNLIGNLSNLELKPLRKYFNDKIHAKADHWDEQKFTETYCHWILGEWRVGVKDQDKKDGAKYSYKDLCNELKQKVTKAGLVDFLLELDPCRTIPPYLDNNNRKPPKCQSLILNPKFLDNQYPNWQQYLQELKKLQSIQNYLDSFETDLKVLKSSKDQPYFVEYKSSNQQIASGQRDYKDLDARILQFIFDRVKASDELLLNEIYFQAKKLKQKASSELEKLESSKKLDEVIANSQLSQILKSQHTNGIFEQGTFLHLVCKYYKQRQRARDSRLYIMPEYRYDKKLHKYNNTGRFDDDNQLLTYCNHKPRQKRYQLLNDLAGVLQVSPNFLKDKIGSDDDLFISKWLVEHIRGFKKACEDSLKIQKDNRGLLNHKINIARNTKGKCEKEIFNLICKIEGSEDKKGNYKHGLAYELGVLLFGEPNEASKPEFDRKIKKFNSIYSFAQIQQIAFAERKGNANTCAVCSADNAHRMQQIKITEPVEDNKDKIILSAKAQRLPAIPTRIVDGAVKKMATILAKNIVDDNWQNIKQVLSAKHQLHIPIITESNAFEFEPALADVKGKSLKDRRKKALERISPENIFKDKNNRIKEFAKGISAYSGANLTDGDFDGAKEELDHIIPRSHKKYGTLNDEANLICVTRGDNKNKGNRIFCLRDLADNYKLKQFETTDDLEIEKKIADTIWDANKKDFKFGNYRSFINLTPQEQKAFRHALFLADENPIKQAVIRAINNRNRTFVNGTQRYFAEVLANNIYLRAKKENLNTDKISFDYFGIPTIGNGRGIAEIRQLYEKVDSDIQAYAKGDKPQASYSHLIDAMLAFCIAADEHRNDGSIGLEIDKNYSLYPLDKNTGEVFTKDIFSQIKITDNEFSDKKLVRKKAIEGFNTHRQMTRDGIYAENYLPILIHKELNEVRKGYTWKNSEEIKIFKGKKYDIQQLNNLVYCLKFVDKPISIDIQISTLEELRNILTTNNIAATAEYYYINLKTQKLHEYYIENYNTALGYKKYSKEMEFLRSLAYRSERVKIKSIDDVKQVLDKDSNFIIGKITLPFKKEWQRLYREWQNTTIKDDYEFLKSFFNVKSITKLHKKVRKDFSLPISTNEGKFLVKRKTWDNNFIYQILNDSDSRADGTKPFIPAFDISKNEIVEAIIDSFTSKNIFWLPKNIELQKVDNKNIFAIDTSKWFEVETPSDLRDIGIATIQYKIDNNSRPKVRVKLDYVIDDDSKINYFMNHSLLKSRYPDKVLEILKQSTIIEFESSGFNKTIKEMLGMKLAGIYNETSNN

SEQ ID NO: 49 - protein, 1068 aa, Verminephrobacter eiseniae
MNKAVAYRLALDLGSTSLGWAIFRLNEAREPTAIIRAGVRIFSDGRNANSEPLAVHRRVARAMRRRRDRLLKRKKRMHDQLVQHGFFPAEVAERKELERLNPYQLRAKGLHEALTPGEFARALFHINQRRGFKSNRKTDRKDNDSGALKQAISELRKRIQDSDCATAGEWFWKERMQQKPEGVRGQWVRARYRKTPSTTDEGKKRIGYDLYVDRAMVEQEFDALWAAQAALQPGLFTEAARAELKDTLLYQRDLRPVKPGRCTLLPAEERAPLALPSTQRFRILQEVNNLRLLDEALREVPLNLAQRDAVVSALEGKKELSFAAIRKLLTLSGKFNLEDEKRAELKGNATSVILARKDLFGDAWAGFDAAVQDEIVWRLVSQESEGALIAWLQQHTGVDGVCAEAIVNTRLPDGYGRLSRKALERIVPALQREVCTYDKAVQAAGFAHHSDLGFDFDYAEDEVQQVGEHTIASTGEVQAQYAFKQLPYYGKALQRHVAFGSGDAKDHEEKCYGKIANPTVHIGLNQVRTVVNALIRRYGHPTEVVVELARDLKQSREQKQQTQREQADNQKRNEDIRKRIAPILETSPERVRDRDIKKWILWEELNKKDIADRHCPYSGERISATMLLSEAVEIEHILPFSRTLDDSLNNRTVAMRRANRIKGDRTPWEARADFEAQGWRYEAILQRAEGMPPRKRYRFAEDGYQRWLGKDRNFLARALNDTSYLSRLAANYLRLVCPQGVRVIPGQMTDKLRGKFGLNSVLGLDGKKNRNDHRHHAVDACVIGVTDQGLMQRFANASKQARENGLTRLVQDMLLPWWPSYYDHVERAVRHIRVSHRPDHGFEGAMMKGTAHGIREDGIREDGRIKQRPKAKGSADHKTITLIPIDEPRQLARHGVDAEGKPLPYKGYASGSNYCIEITKNGKGKWEGQVISTFDAYRIKAAADAAARAGQVISTVEADSIVRKSGWERLRGAQSQNGQPLVMRLVIGDSVRMEVDGRDEVMRVVKMSGKEMVFAPVREANVDKRNNMPDEQDPFTYTYKRADQLRKAKARQVTISPIGELRDPGFKG

SEQ ID NO: 50 - protein, 1125 aa, Francisella tularensis
MNVKILPIAIDLDVKNTGVFSAFYQKGTSLEKLDNKNGKVYELSKDSYTLLMNNRTARRHQRRGIDRKQLVKRLFKLVWTEQLNLEWDKDTQQAISFLFNRRGFSFITDGYSTEYLNIVPEQVKAILMDIFDDYNGEDDLDSYLKLATEQESKISEIYNKLMQKILEFKLRKLCTDIKDDKVSTKTLKEITSYEFELLADYLANYSESLKIQKFSYTDKQGNLKELSYYHHDKYNIQEFLKRHATINDEILDTLLTDDFDIWNFNFEKFDFDKNEEKLQNQEDKDHTQAHLHHFVFAVNKIKSEMASGGRHRSQYFQEITNVLDENNHQEGYLKNFCENLHNKKYSNLSVKNLVNLVGNLSNLELKPLRKYFNDKIHAKADHWDEQKFTETYCHWILGEWRVGVKDQDKKDGAKYSYKDLCNELKQKVTKAGLIDFLLELDPCRTIPPYLDNNNRKPPKCQSLILNPKFLDNQYPNWQQYLQELKKLQSIQDYLDSFETDLKDLKSSKDQPYFVEYKSSNQQMASGQRDYKDLDARILQFIFDRVKASDELLLNEIYFQAKKLKQKASSELEKLESSKKLDEVIANSQLSQILKSQHTNGIFEQGTFLHLVCKYYKQRQRARDSRLYIMPEYRYDKKLDKYNNTGRFDDNNQLLTYCNHKPRQKRYQLLNDLAGVLQVSRNQLLSSVEEWFQQAQRVGEISKSQDEQIFEWLKSFKIASYCKAAVEMQKQYRGTLKNAIQTAIFRQSENINKNKNKNTGNQQQALSENSKDVKSLTADEKKLLKLIENIAKASQKIGESLGLNDKQIKKFNSIYSFAQIQQIAFAERKGNANTCAVCSADNAHRMQQIKITELVEDNKDNIILSAKAQRLPAIPTRIVDGAVKKMATILAKNIVDDNWQNIKQVLSAKHQLHIPIITESNAFEFEPALADVKGKSLKDRRKKALERISPENIFKDKNNRIKEFAKGISAYSGANLTDGDFDGAKEELDHIIPRSHKKYGTLNDEANLICVTRDDNKNIFAIDTSKWFEIETPSDLRDIGVATIQYKIDNNSRPKVRVKLDYVIDDDSKINYFMNHSLLKSRYPDKVLEILKQSTIIEFESSGFNKTIKEMLGMTLAGIYNETSNN

SEQ ID NO: 51 - protein, 1064 aa, Bradyrhizobium sp.
MKRTSLRAYRLGVDLGANSLGWFVVWLDDHGQPEGLGPGGVRIFPDGRNPQSKQSNAAGRRLARSARRRRDRYLQRRGKLMGLLVKHGLMPADEPARKRLECLDPYGLRAKALDEVLPLHHVGRALFHLNQRRGLFANRAIEQGDKDASAIKAAAGRLQTSMQACGARTLGEFLNRRHQLRATVRARSPVGGDVQARYEFYPTRAMVDAEFEAIWAAQAPHHPTMTAEAHDTIREAIFSQRAMKRPSIGKCSLDPATSQDDVDGFRCAWSHPLAQRFRIWQDVRNLAVVETGPTSSRLGKEDQDKVARALLQTDQLSFDEIRGLLGLPSDARFNLESDRRDHLKGDATGAILSARRHFGPAWHDRSLDRQIDIVALLESALDEAAIIASLGTTHSLDEAAAQRALSALLPDGYCRLGLRAIKRVLPLMEAGRTYAEAASAAGYDHALLPGGKLSPTGYLPYYGQWLQNDVVGSDDERDTNERRWGRLPNPTVHIGIGQLRRVVNELIRWHGPPAEITVELTRDLKLSPRRLAELEREQAENQRKNDKRTSLLRKLGLPASTHNLLKLRLWDEQGDVASECPYTGEAIGLERLVSDDVDIDHLIPFSISWDDSAANKVVCMRYANREKGNRTPFEAFGHRQGRPYDWADIAERAARLPRGKRWRFGPGARAQFEELGDFQARLLNETSWLARVAKQYLAAVTHPHRIHVLPGRLTALLRATWELNDLLPGSDDRAAKSRKDHRHHAIDALVAALTDQALLRRMANAHDDTRRKIEVLLPWPTFRIDLETRLKAMLVSHKPDHGLQARLHEDTAYGTVEHPETEDGANLVYRKTFVDISEKEIDRIRDRRLRDLVRAHVAGERQQGKTLKAAVLSFAQRRDIAGHPNGIRHVRLTKSIKPDYLVPIRDKAGRIYKSYNAGENAFVDILQAESGRWIARATTVFQANQANESHDAPAAQPIMRVFKGDMLRIDHAGAEKFVKIVRLSPSNNLLYLVEHHQAGVFQTRHDDPEDSFRWLFASFDKLREWNAELVRIDTLGQPWRRKRGLETGSEDATRIGWTRPKKWP

SEQ ID NO: 52 - protein, 1354 aa, Flavobacterium psychrophilum
MKKILGLDLGTNSIGWAFINEAENEIEVSSIVNTGVRIVPLTTDEESDFKKGNTISINADRTLKRGARRGLQRFKQRREALLETFNRIKFIATDFVYAETGAATTFSSYQLRAKSAVEAVTKEELVKVLLMLNKKRGYKSSRKAKTAEEGDAIDGMKIAKEIFENNLTPGQWVYNSLSKGGKFIPDFYHSDLQKELEKIVRFQNQFHSEQINDKLLADIQGKSRTQTSQHFSKTLNIPLAENKGTREETKLQHYQWRNEALANELDMKILAFIITEINNQINQSSGYLGAISDRSKELYFNQETVGQYQYKQLQENVHAKLKNQVFYRQDYLDEFEKIWETQAKFHSELNEKLKAEIRDITIFYQRKLKSQKHLVSFCEFEKGHKAIPKSSPLFQEFRIWQNLNNVVVKNETTKEVFELSEELKQLIAEELQFKESMTDVQMLTFCELKKGTHTVNFKKIEGNRTNTSIYKAFEKILEVEGYEIDFSKMKPLEIKETVAPIFETLNINTVILDFDPTIQGNDFDKQPYYQLWHLLYSAEDDDKLKETLKTKFGFKENHLPFILNINLQADYGSLSAKAIKKILPHLMDGHIYDKACLMVGYNHSSSLTTAQNNDRVLKDTLELLKKNSLRNPVVEKILNQMINVINAIMKDPAMGKPDEIRVELARELKANNEQRKKATSDINTATTEHERIRKLLHSEFNIPRVTRNDIIRYKLWLETGGISLYTGNPIKASDLFSKNYDIEHIIPKSRLFDDSFSNKTLCERQLNIDKSNKTAYSFLQEKLSENDFAAYENRVKDLFKTGKIKSYTKYKKLLMADNEIPEGFIDRQLRETQYIAKKAKEILLEVSRNVTATIGSVTDKLRQDWELVDVMKELNWEKYDKLGLTHIEEGKNGERLSKIKDWTKRNDHRHHAMDAITVAFTKPAYIQYLNNLNAKTQGENKANSIIGIENKHLYRDKNNKLRFISPMKNFREEAKKQLESILISYKAKNKVVTKNKNTTKKSGGTNQKIQLTPRGRLHKETVYGKLQQYATKEEKVNASFTEDYIQKVAKKEYREALLKRLEENDNDPKKAFTGKNALNKTPIYISLKDNIIVPEKVKTVWLETDYTIRKDITPDLKIDKVIDVGIKRILQNRLNEFNGDPKKAFVNLGESPIWLNKEKGIAIKRVTISGVSNAQALHTKKDHLGNEILDKNGNPIPVDFISTGNNHHVAIYRDEKGNLQEEVVSFYDAVIRRNLGLSVINKNHEKGWEFLFSMKQNEFFIFPSDGFNPHEIDLLNPNNYHLISPNIFRVQKISTKNYMFNHHLETKAVDGEMLKSKKELSKTSYHFIQTPTNLNGIIKVRINHLGKIVHLGEY

SEQ ID NO: 53 - protein, 1062 aa, Actinobacillus succinogenes
MNLNYILGLDLGIASVGWAVVEIDEQENPQRLIDVGVRTFDRAEVLKTGESLALARRLARSSRRLVKRRAERIKKAKRLLKAENLLLSADEILPNEAWQLRVKGLDQKLERQEWAAVLLHLLKHRGYLSQRKNESKSENKELGALLSGVAINHQILQSAEYRTPAEIAVNKFQAEEGHIRNQRGAYTHTFSRLDLLAEMELLFQRQATLGNPHTSTKLLENLTALLMWQKPALAGEAILKMLGKCTFEPTEYKAAKNSYSAERFVWLTKLNNLRILEQGAERALTDNERFALLDQPYEKAKLTYAQVRTLLGLSDEAIFKGLRYQGEDKKAVETKTTLMEVKAYHQIRKALEGLDLKAEWNELKNNPALLDEIGTAFSLYKTDDDIHRYLDGKLSESVLNALLENLNFDKFIQLSLKALQQILPLMLQGQRYDEAVSAIYGDHYGKKSDEIDRLLPNIPTDEIRNPVVLRTLTQARKVINAVVRLYGSPARIHIETGREVGKSYQDRKKLEKQQEENRKQRENAVKKFKEYFPNFVGEPKGKDILKMRLYELQQAKCLYSGKSLELYRLLEKGYVEVDHALPFSRTWDDSFNNKVLVLANENQNKGNATPYEWLDGKNNSEGWQHFVARVQTSGFSYAKKQRVLIQELDEKSFIERNLNDTRYVARFLCNHIADNMLLTGKGKRKVFASNGQITALLRGCWGLQKVRENNDRHHALDAVVVACSTKSMQDKITKFVKYKEGRLFKDKKDGVYKGERINRETGEIISLHFPTPWKFFKENVEIRIFSENPKLELENRLPDYPQYNHEFVQPLFVSRMPTRKMTGQGHMETVKSAKRLDKGLSVLKVPLTQLKLSDLERMVNREREMALYEALKECLEQFGNDPAKAFAEPFYKKGGALVKAVRVEQTQKSGVLVRNGNGVADNATGSIVRVDVFTKGGKYFLVPIYTWQVAKGILPNKAVIQGKDESEWEEMDENAVFQFSMHKNDLIKVKTKKGEIFGYFNGLDRATGSIEIEEHDLEKSKGKNGSHRGLGVKTAFFLEKYQVDELGKNIRPCRPTKRQHVR

SEQ ID NO: 54 - protein, 1340 aa, Dorea longicatena
MEQEYYLGLDMGTGSVGWAVTDSEYHVLRKHGKALWGVRLFESASTAEERRMFRTSRRRLDRRNWRIEILQEIFAEEISKKDPGFFLRMKESKYYPEDKRDINGNCPELPYALFVDDDFTDKDYHKKFPTIYHLRKMLMNTEETPDIRLVYLAIHHMMKHRGHFLLSGDINEIKEFGTTFSKLLENIKNEELDWNLELGKEEYAVVESILKDNMLNRSTKKTRLIKALKAKSICEKAVLNLLAGGTVKLSDIFGLEELNETERPKISFADNGYDDYIGEVENELGEQFYIIETAKAVYDWAVLVEILGKYTSISEAKVATYEKHKSDLQFLKKIVRKYLTKEEYKDIFVSTSDKLKNYSAYIGMTKINGKKVDLQSKRCSKEEFYDFIKKNVLKKLEGQPEYEYLKEELERETFLPKQVNRDNGVIPYQIHLYELKKILGNLRDKIDLIKENEDKLVQLFEFRIPYYVGPLNKIDDGKEGKFTWAVRKSNEKIYPWNFENVVDIEASAEKFIRRMTNKCTYLMGEDVLPKDSLLYSKYMVLNELNNVKLDGEKLSVELKQRLYTDVFCKYRKVTVKKIKNYLKCEGIISGNVEITGIDGDFKASLTAYHDFKEILTGTELAKKDKENIITNIVLFGDDKKLLKKRLNRLYPQITPNQLKKICALSYTGWGRFSKKFLEEITAPDPETGEVWNIITALWESNNNLMQLLSNEYRFMEEVETYNMGKQTKTLSYETVENMYVSPSVKRQIWQTLKIVKELEKVMKESPKRVFIEMAREKQESKRTESRKKQLIDLYKACKNEEKDWVKELGDQEEQKLRSDKLYLYYTQKGRCMYSGEVIELKDLWDNTKYDIDHIYPQSKTMDDSLNNRVLVKKKYNATKSDKYPLNENIRHERKGFWKSLLDGGFISKEKYERLIRNTELSPEELAGFIERQIVETRQSTKAVAEILKQVFPESEIVYVKAGTVSRFRKDFELLKVREVNDLHHAKDAYLNIVVGNSYYVKFTKNASWFIKENPGRTYNLKKMFTSGWNIERNGEVAWEVGKKGTIVTVKQIMNKNNILVTRQVHEAKGGLFDQQIMKKGKGQIAIKETDERLASIEKYGGYNKAAGAYFMLVESKDKKGKTIRTIEFIPLYLKNKIESDESIALNFLEKGRGLKEPKILLKKIKIDTLFDVDGFKMWLSGRTGDRLLFKCANQLILDEKIIVTMKKIVKFIQRRQENRELKLSDKDGIDNEVLMEIYNTFVDKLENTVYRIRLSEQAKTLIDKQKEFERLSLEDKSSTLFEILHIFQCQSSAANLKMIGGPGKAGILVMNNNISKCNKISIINQSPTGIFENEIDLLKI

SEQ ID NO: 55 - protein, 984 aa, Campylobacter jejuni
MAKILAFDIGISSIGWAFSENDELKDCGVRIFTKAENPKTGESLALPRRIARSARKRLARRKARLNHLKHLIANEFKLNYEDYQSFDEILAKAYKGSLISPYELRFRALNELLSKQDFARVILHIAKRRGYDDIKNNGDEEKGKILKAIKQNEEKLANYQSVGEYLYKEYFQKFKENSKEFINVRNKKESYERCIAQSFLKDELKLIFKKQREFGFSFSKKFEEEVLSVAFYKRALKDFSHLVGNCSFFTDEKRAPKNSPLAFMFVALTRIINLLNNLKNTLYTKDDLNALLNEVLKNGTLTYKQTKKLLGLSDDYEFKGEKGNYFIEFKKYKEFIKALGEHSLSQDDLNEIAKDITLIKDEIKLKKALAKYDLNENQIDNLSKLEFKDHLNISFKALKLITPLMLEGKKYDEACNELTLKVAINEDKKDFLPAFNETYYKDEVTNPVVLRAIKEYRKVLNALLKKYGKVHKINIELAREVGKNHSQRAKIEKEQNENYKAKKDAELECEKLGLKINSKNILKLRLFKEQKEFCVYSGEKIKLSDLQDEKMLEIDHIYPYSRSFDDSYMNKVLVFTKQNQEKLNQTPFEAFGNDSAKWQKIEVLAKNLPTKKQKRILDKNYKDKEQKDFKDRNLNDTRYIARLVLNYTKDYLDFLPLSDDENTKLNDTQKGSKVHVEAKSGMLTSALRHTWGFSTKDRNNHLHHAIDAVIIAYANNSIVKAFSDFKKEQESNTAELYAKKISELDYKNKRKFFEPFSGFRQKVLDKIDEIFVSKPERKKPSGALHEETFRKEEEFYQSYGGKEGVLKALELGKIRKVNGKIVKNGDMFRVDIFKHKKTNKFYAVPIYTMDFALKVLPNKAVARSKKGEIKDWILMDENYEFCFSLYKDSLILIQTKDMQEPEFVYYNAFTSSTVSLIVSKHDNKFETLSKNQKILFKNANEKEVIAKSIGIQNLKVFEKYIVSALGEVTKAEFRQREEFKNELR

SEQ ID NO: 56 - protein, 1037 aa, Parvibaculum lavamentivorans
MERIFGFDIGTTSIGFSVIDYSSTQSAGNIQRLGVRIFPEARDPDGTPLNQQRRQKRMMRRQLRRRRIRRKALNETLHEAGFLPAYGSADWPVVMADEPYELRRRGLEEGLSAYEFGRAIYHLAQHRHFKGRELEESDTPDPDVDDEKEAANERAATLKALKNEQTTLGAWLARRPPSDRKRGIHAHRNVVAEEFERLWEVQSKFHPALKSEEMRARISDTIFAQRPVFWRKNTLGECRFMPGEPLCPKGSWLSQQRRMLEKLNNLAIAGGNARPLDAEERDAILSKLQQQASMSWPGVRSALKALYKQRGEPGAEKSLKFNLELGGESKLLGNALEAKLADMFGPDWPAHPRKQEIRHAVHERLWAADYGETPDKKRVIILSEKDRKAHREAAANSFVADFGITGEQAAQLQALKLPTGWEPYSIPALNLFLAELEKGERFGALVNGPDWEGWRRTNFPHRNQPTGEILDKLPSPASKEERERISQLRNPTVVRTQNELRKVVNNLIGLYGKPDRIRIEVGRDVGKSKREREEIQSGIRRNEKQRKKATEDLIKNGIANPSRDDVEKWILWKEGQERCPYTGDQIGFNALFREGRYEVEHIWPRSRSFDNSPRNKTLCRKDVNIEKGNRMPFEAFGHDEDRWSAIQIRLQGMVSAKGGTGMSPGKVKRFLAKTMPEDFAARQLNDTRYAAKQILAQLKRLWPDMGPEAPVKVEAVTGQVTAQLRKLWTLNNILADDGEKTRADHRHHAIDALTVACTHPGMTNKLSRYWQLRDDPRAEKPALTPPWDTIRADAEKAVSEIVVSHRVRKKVSGPLHKETTYGDTGTDIKTKSGTYRQFVTRKKIESLSKGELDEIRDPRIKEIVAAHVAGRGGDPKKAFPPYPCVSPGGPEIRKVRLTSKQQLNLMAQTGNGYADLGSNHHIAIYRLPDGKADFEIVSLFDASRRLAQRNPIVQRTRADGASFVMSLAAGEAIMIPEGSKKGIWIVQGVWASGQVVLERDTDADHSTTTRPMPNPILKDDAKKVSIDPIGRVRPSND

SEQ ID NO: 57 - protein, 1107 aa, Eubacterium ventriosum
MGYTVGLDIGVASVGVAVLDENDNIVEAVSNIFDEADTSNNKVRRTLREGRRTKRRQKTRIEDFKQLWETSGYIIPHKLHLNIIELRNKGLTELLSLDELYCVLLSMLKHRGISYLEDADDGEKGNAYKKGLAFNEKQLKEKMPCEIQLERMKKYGKYHGEFIIEINDEKEYQSNVFTTKAYKKELEKIFETQRCNGNKINTKFIKKYMEIYERKREYYIGPGNEKSRTDYGIYTTRTDEEGNFIDEKNIFGKLIGKCSVYPEEYRASSASYTAQEFNLLNDLNNLKINNEKLTEFQKKEIVEIIKDASSVNMRKIIKKVIDEDIEQYSGARIDKKGKEIYHTFEIYRKLKKELKTINVDIDSFTREELDKTMDILTLNTERESIVKAFDEQKFVYEENLIKKLIEFRKNNQRLFSGWHSFSYKAMLQLIPVMYKEPKEQMQLLTEMNVFKSKKEKYVNYKYIPENEVVKEIYNPVVVKSIRTTVKILNALIKKYGYPESVVIEMPRDKNSDDEKEKIDMNQKKNQEEYEKILNKIYDEKGIEITNKDYKKQKKLVLKLKLWNEQEGLCLYSGKKIAIEDLLNHPEFFEIDHIIPKSISLDDSRSNKVLVYKTENSIKENDTPYHYLTRINGKWGFDEYKANVLELRRRGKIDDKKVNNLLCMEDITKIDVVKGFINRNLNDTRYASRVVLNEMQSFFESRKYCNTKVKVIRGSLTYQMRQDLHLKKNREESYSHHAVDAMLIAFSQKGYEAYRKIQKDCYDFETGEILDKEKWNKYIDDDEFDDILYKERMNEIRKKIIEAEEKVKYNYKIDKKCNRGLCNQTIYGTREKDGKIHKISSYNIYDDKECNSLKKMINSGKGSDLLMYNNDPKTYRDMLKILETYSSEKNPFVAYNKETGDYFRKYSKNHNGPKVEKVKYYSGQINSCIDISHKYGHAKNSKKVVLVSLNPYRTDVYYDNDTGKYYLVGVKYNHIKCVGNKYVIDSETYNELLRKEGVLNSDENLEDLNSKNITYKFSLYKNDIIQYEKGGEYYTERFLSRIKEQKNLIETKPINKPNFQRKNKKGEWENTRNQIALAKTKYVGKLVTDVLGNCYIVNMEKFSLVVDK

SEQ ID NO: 58 - protein, 1136 aa, Streptococcus gordonii
MNGLVLGLDIGIASVGVGILEKDTGKIIHASSRLFPAATADNNVERRSNRQGRRLNRRKKHRSVRLQDLFEGYGLLTDFSKVSMNLNPYQLRVQGMENQLTNEELFVALKNIVKRRGISYLDDASEDGGTVSSDYGKAVEENRKLLAEKTPGQIQLERFEKYGQLRGDFTVEENGEKHRLINVFSTSAYRKEAERILRKQQEFNSKITDEFIEDYLIILTGKRKYYHGPGNEKSRTDYGRFRTDGTTLDNIFGILIGKCTFYTEEYRASKASYTAQEFNLLNDLNNLTVPTETKKLSEEQKKLIIEYAKSAKTLGASTLLKYIAKMIDASVDQIRGYRVDVNNKPEMHTFEVYRKMQSLETIKVEELPRKVLDELAHILTLNTEREGIEEAINSKLKDIFNRDQVLELVQFRKNNSSLFSKGWHNFSIKLMMELIPELYETSEEQMTILTRLGKQRSKETSKRTKYIDEKELTEEIYNPVVAKSVRQAIKIINEATKKYGIFDNIVIEMARENNEEDAKKDYIKRQKANQDEKNAAMEKAAFQYNGKKELPDNIFHGHKELTTKIRLWHQQGEKCLYTGKNIPISDLIHNQYKYEIDHILPLSLSFDDSLSNKVLVLATANQEKGQRTPFQALDSMDDAWSYREFKSYVKDSKLLSNKKKDYLLTEEDISKIEVKQKFIERNLVDTRYSSRVVLNALQDFYKSHQLDTTISVVRGQFTSQLRRKWGIEKSRETYHHHAVDALIIAASSQLRLWKKHSNPLIAYKEGQFVDSETGEIVSLSDEEYKELVFKAPYDHFVDTLRSKKFEDSILFSYQVDSKYNRKISDATIYATRKAKLDKEKKEYTYTLGKIKDIYALGTKTPSKTGFYKFLDLYKTDKSQFLMYQKDRKTWDEVIEKIIEQYRPFKEYDKNGKEVDFNPFEKYRIGNGPIRKYSKKGNGPEIKSLKYYDILLGKHKNITPDGSRNTVALLSLNPWRTDVYYNSETKKYEFLGLKYADLCFEEGGAYGISEVKYKKIREKEGIGKNSEFKFTLYKNDLILIKDTETNCQQFFRFWSRTGKDNPKSFEKHKIELKPYEKAKFEKGEELKVLGKVPPSSNQFQKNMQIENLSIYKVKTDILGNKHFIKKEGDEPKLKFKK

SEQ ID NO: 59 - protein, 984 aa, Campylobacter jejuni
MARILAFDIGISSIGWAFSENDELKDCGVRIFTKAENPKTGESLALPRRLARSARKRLARRKARLNHLKHLIANEFKLNYEDYQSFDESLAKAYKGSLISPYELRFRALNELLSKQDFARVILHIAKRRGYDDIKNNGDEEKSEILKAIKQNEEKLVNYQSVGEYLYKEYFQKFKENSKEFINVRNKKESYERCITQSFLKDELKLIFQKQREFGFSFSKKFEEEVLSVAFYKRALKDFSHLVGNCSFFTDEKRAPKNSPLAFMFVALTRIINILNNLKNTEGILYTKDDLNALLNEVLKNGTLTYKQTKKLLGLSDDYEFKGEKGTYFIEFKKYKEFIKALGEHNLSQDDLNEIAKDITLIKDEIKLKKALAKYDLNQNQIDSLSKLEFKDHLNISFKALKLITPLMLEGKKYDEACNELNLKVAINEDKKDFLPAFNETYYKDEVTNPVVLRAIKEYRKILNALLKKYGKVHKINIELAREVGKNHSQRAKIEKEQNENYKAKKDAEIECEKLGLKINSKNILKLRLFKEQKEFCAYSGEKIKLSDLQDEKMLEIDHIYPYSRSFDDSYMNKVLVFTKQNQEKLNKTPFEAFGNDSTKWQKIEVLAKNLPEKKQKRILDKNYKDKEQKDFKDRNLNDTRYIARLVLNYTKDYLDFLPLSDDENTKLNDTQKGSKVHVEAKSGMLTSALRHTWGFSAKDRNNHLHHAIDAAIIAYANNSIVKAFSDFKKEQESNSVELYAKKISELDYKNKRKFFEPFSGFRQKVLDKIDEIFVSKPERKKPSGALHEETFRKEEEFYQSYGGKEGVLKALELGKIRKVNGKIVKNGDMFRVDIFKHKKTNKFYAVPIYTMDFALKVLPNKAVARSKKGEIKDWILMDENYEFCFSLYKDSLILIQTKDMQEPELVYFNAFTSSTVSLIVSKHDNKFETLSKNQKILFKNANEKEVIAKSIGIQNLKVFEKYIVSALGEVTKAEFRQREDFKK

SEQ ID NO: 60 - protein, 1079 aa, Dinoroseobacter shibae
MRLGLDIGTSSIGWWLYETDGAGSDARITGVVDGGVRIFSDGRDPKSGASLAVDRRAARAMRRRRDRYLRRRATLMKVLAETGLMPADPAEAKALEALDPFALRAAGLDEPLPLPHLGRALFHLNQRRGFKSNRKTDRGDNESGKIKDATARLDMEMMANGARTYGEFLHKRRQKATDPRHVPSVRTRLSIANRGGPDGKEEAGYDFYPDRRHLEEEFHKLWAAQGAHHPELTETLRDLLFEKIFFQRPLKEPEVGLCLFSGHHGVPPKDPRLPKAHPLTQRRVLYETVNQLRVTADGREARPLTREERDQVIHALDNKKPTKSLSSMVLKLPALAKVLKLRDGERFTLETGVRDAIACDPLRASPAHPDRFGPRWSILDADAQWEVISRIRRVQSDAEHAALVDWLTEAHGLDRAHAEATAHAPLPDGYGRLGLTATTRILYQLTADVVTYADAVKACGWHHSDGRTGECFDRLPYYGEVLERHVIPGSYHPDDDDITRFGRITNPTVHIGLNQLRRLVNRIIETHGKPHQIVVELARDLKKSEEQKRADIKRIRDTTEAAKKRSEKLEELEIEDNGRNRMLLRLWEDLNPDDAMRRFCPYTGTRISAAMIFDGSCDVDHILPYSRTLDDSFPNRTLCLREANRQKRNQTPWQAWGDTPHWHAIAANLKNLPENKRWRFAPDAMTRFEGENGFLDRALKDTQYLARISRSYLDTLFTKGGHVWVVPGRFTEMLRRHWGLNSLLSDAGRGAVKAKNRTDHRHHAIDAAVIAATDPGLLNRISRAAGQGEAAGQSAELIARDTPPPWEGFRDDLRVRLDRIIVSHRADHGRIDHAARKQGRDSTAGQLHQETAYSIVDDIHVASRTDLLSLKPAQLLDEPGRSGQVRDPQLRKALRVATGGKTGKDFENALRYFASKPGPYQAIRRVRIIKPLQAQARVPVPAQDPIKAYQGGSNHLFEIWRLPDGEIEAQVITSFEAHTLEGEKRPHPAAKRLLRVHKGDMVALERDGRRVVGHVQKMDIANGLFIVPHNEANADTRNNDKSDPFKWIQIGARPAIASGIRRVSVDEIGRLRDGGTRPI

SEQ ID NO: 61 - protein, 1096 aa, Eubacterium dolichum
MMEVFMGRLVLGLDIGITSVGFGIIDLDESEIVDYGVRLFKEGTAAENETRRTKRGGRRLKRRRVTRREDMLHLLKQAGIISTSFHPLNNPYDVRVKGLNERLNGEELATALLHLCKHRGSSVETIEDDEAKAKEAGETKKVLSMNDQLLKSGKYVCEIQKERLRTNGHIRGHENNFKTRAYVDEAFQILSHQDLSNELKSAIITIISRKRMYYDGPGGPLSPTPYGRYTYFGQKEPIDLIEKMRGKCSLFPNEPRAPKLAYSAELFNLLNDLNNLSIEGEKLTSEQKAMILKIVHEKGKITPKQLAKEVGVSLEQIRGFRIDTKGSPLLSELTGYKMIREVLEKSNDEHLEDHVFYDEIAEILTKTKDIEGRKKQISELSSDLNEESVHQLAGLTKFTAYHSLSFKALRLINEEMLKTELNQMQSITLFGLKQNNELSVKGMKNIQADDTAILSPVAKRAQRETFKVVNRLREIYGEFDSIVVEMAREKNSEEQRKAIRERQKFFEMRNKQVADIIGDDRKINAKLREKLVLYQEQDGKTAYSLEPIDLKLLIDDPNAYEVDHIIPISISLDDSITNKVLVTHRENQEKGNLTPISAFVKGRFTKGSLAQYKAYCLKLKEKNIKTNKGYRKKVEQYLLNENDIYKYDIQKEFINRNLVDTSYASRVVLNTLTTYFKQNEIPTKVFTVKGSLTNAFRRKINLKKDRDEDYGHHAIDALIIASMPKMRLLSTIFSRYKIEDIYDESTGEVFSSGDDSMYYDDRYFAFIASLKAIKVRKFSHKIDTKPNRSVADETIYSTRVIDGKEKVVKKYKDIYDPKFTALAEDILNNAYQEKYLMALHDPQTFDQIVKVVNYYFEEMSKSEKYFTKDKKGRIKISGMNPLSLYRDEHGMLKKYSKKGDGPAITQMKYFDGVLGNHIDISAHYQVRDKKVVLQQISPYRTDFYYSKENGYKFVTIRYKDVRWSEKKKKYVIDQQDYAMKKAEKKIDDTYEFQFSMHRDELIGITKAEGEALIYPDETWHNFNFFFHAGETPEILKFTATNNDKSNKIEVKPIHCYCKMRLMPTISKKIVRIDKYATDVVGNLYKVKKNTLKFEFD

SEQ ID NO: 62 - protein, 1082 aa, Neisseria meningitidis
MAAFKPNPINYILGLDIGIASVGWAMVEIDEDENPICLIDLGVRVFERAEVPKTGDSLAMARRLARSVRRLTRRRAHRLLRARRLLKREGVLQAADFDENGLIKSLPNTPWQLRAAALDRKLTPLEWSAVLLHLIKHRGYLSQRKNEGETADKELGALLKGVADNAHALQTGDFRTPAELALNKFEKESGHIRNQRGDYSHTFSRKDLQAELNLLFEKQKEFGNPHISDGLKEGIETLLMTQRPALSGDAVQKMLGHCTFEPAEPKAAKNTYTAERFIWLTKLNNLRILEQGSERPLTDTERTTLIDEPYRKSKLTYAQARKLLELDNTAFFKGLRYGKDNAEASTLMEMKAYHAISRALEKEGLKDKKSPLNLSPELQDEIGTAFSLFKTDEDITGRLKDRVQPEILEALLKHISFDKFVQISLKALRRIVPLMEQGKRYDEACAEIYGDHYGKKNTEEKIDLPPIPADEIRNPVVLRALSQARKVINGVVRRYGSPARIHIETAREVGKSFKDRKEIEKRQEENRKDREKAATKFREYFPNFVGEPKSKDILKLRLYEQQHGKCLYSGKEINLGRLNEKGYVEIDHALPFSRTWDDSFNNKVLVLGSENQNKGNQTPYEYFNGKDNSREWQEFKARVETSRFPRSKKQRILLQKFDEEGFKERNLNDTRYVNRFLCQFVADHMLLTGKGKRRVFASNGQITNLLRGFWGLRKVRAENDRHHALDAVVVACSTVAMQQKITRFVRYKEMNAFDGKTIDKETGEVLHQKTHFPQPWEFFAQEVMIRVFGKPDGKPEFEEADTPEKLRTLLAEKLSSRPEAVHEYVTPLFVSRAPNRKMSGQGHMETVKSAKRLDEGVSVLRVPLTQLKLKDLEKMVNREREPKLYEALKARLEAHKDDPAKAFAEPFYKYDKAGNRTQQVKAVRVEQVQKTGVWVRNHNGIADNATMVRVDVFEKGDKYYLVPIYSWQVAKGILPDRAVVQGKDEEDWQLIDDSFNFKFSLHPNDLVEVITKKARMFGYFASCHRGTGNINIRIHDLDHKIGKNGILEGIGVKTALSFQKYQIDELGKEIRPCRLKKRPPVR

SEQ ID NO: 63 - protein, 1050 aa, Gluconacetobacter diazotrophicus
MGENMIDESLTFGIDLGIGSCGWAVLRRPSAFGRKGVIEGMGSWCFDVPETSKERTPTNQIRRSNRLLRRVIRRRRNRMAAIRRLLHAAGLLPSTDSDALKRPGHDPWELRARGLDKPLKPVEFAVVLGHIAKRRGFKSAAKRKATNISSDDKKMLTALEATRERLGRYRTVGEMFARDPDFASRRRNREGKYDRTTARDDLEHEVHALFAAQRRLGQGFASPELEEAFTASAFHQRPMQDSERLVGFCPFERTEKRAAKLTPSFERFRLLARLLNLRITTPDGERPLTVDEIALVTRDLGKTAKLSIKRVRTLIGLEDNQRFTTIRPEDEDRDIVARTGGAMTGTATLRKALGEALWTDMQERPEQLDAIVQVLSFFEANETITEKLREIGLTLAVLDVLLTALDAGVFAKFKGAAHISTKAARNLLPHLEQGRRYDEACTMAGYDHAASRLSHHGQIVAKTQFNALVTEIGESIANPIARKALIEGLKQIWAMRNHWGLPGSIHVELARDVGNSIEKRREIEKHIEKNTALRARERREVHDLLDLEDVNGDTLLRYRLWKEQGGKCLYTGKAIHIRQIAATDNSVQVDHILPWSRFGDDSFNNKTLCLASANQQKKRSTPYEWLSGQTGDAWNAFVQRIETNKELRGFKKRNYLLKNAKEAEEKFRSRNLNDTRYAARLFAEAVKLLYAFGERQEKGGNRRVFTRPGALTAALRQAWGVESLKKQDGKRINDDRHHALDALTVAAVDEAEIQRLTKSFHEWEQQGLGRPLRRVEPPWESFRADVEATYPEVFVARPERRRARGEGHAATIRQVKERECTPIVFERKAVSSLKEADLERIKDGERNEAIVEAIRSWIATGRPADAPPRSPRGDIITKIRLATTIKAAVPVRGGTAGRGEMVRADVFSKPNRRGKDEWYLVPVYPHQIMNRKAWPKPPMRSIVANKDEDEWTEVGPEHQFRFSLYPRSNIEIIRPSGEVIEGYFVGLHRNTGALTISAHNDPKSIHSGIGTKTLLAISKYQVDRFGRKSPVRKEVRTWHGEACISPTPPG

SEQ ID NO: 64 - protein, 1391 aa, Kordia algicida
MKKILGLDLGTNSIGWALVNEAEHEHEQSSIVKLGVRVNPLSVDEKTNFEKGRPLSINADRTSKRSARRNLQRFKLRRKNLINLLLKHHIISNETILTEVGKNTTHQTLKLRSKATQEKISLEEFARILLSINKKRGYKSSRKEKNEDEGFTIDGMAIAKELYDNQLTPGQYVYNILQDGKNYIPDFYRSDLQAEFDDVWQFQKKFYSSILTDEFYLKLKGQGKENTRKLFLAIHQVYTAENKGKRDAVKLQYYKWRSEAVKKQLSIEEVAYVLVEINNNINKSSGYLGAISDRSKALYFNNETVGEYLYGQLVKNRHNSLRNQVFYRQDYLDEFEKIWETQAKFYDELTNELKQEIRDVVIFYQRKLKSQKHLISDCLFEKHHKAIPKSSPLFQEFKIWQNLNYLEFVHTQSKEKIFFSELDDETRQFVFAELNIRGTLKIKEIKKLIGLETPVYWKSNFDEIEGNRTNQVLYNVYQNIADDLGYGFDWSKKHAFEINAELQAIFKDVGIDTAILNFDASIEENDFDKQKSYQLWHLLYSAEDTDKATEEDKLIYGNINTKLKKQLHQKYGFEAKYGNLLANISLQQDYGNLSAKAIKKILPYLESGNSFYEACTIVGYNPSNSLTKEQQQNRKLKDKLELLPKNSLRNPVVEKILNQKVNLINQLIDEYGKPDEVRIELARELKKSAKQRADLSKHINDATLKNQNIRKTLQKDFGIQNPSKNDVIRYKLYDELKDNGYKTLFTNKYIPKEQLFSKDVDIEHIIPKAILFDDSFSNKTLAYRNVNLAKADATAFDFISSKHLDDLDNYKARVETLFQSKRISKGKYKKLLMTRQNLPEDFIERDLRNSQYIAKKATAMLKEVFRSVVPTSGRITDKLREDWDLVNVMKELNLPKYRTLGLTEFIERKNGNKIEQIIDWTKRNDHRHHAMDALTVAFTTHNHIQYLNNLNVTHGLNGVDTDHEKSRLYAIKQAITKVYIVGKTKKRKFIPPMENFRSHAKNHLEGILISFKNKNKVVTKNKNRTKTKTKGVFNEKIQLTPRGQLHKETIYGHAKKVIVTKEKVSSKFTHEKILQVTKPAYREALLKRLASFKNDPKKAFSGKNALSKNPLYFDITSGKKVPDTVKLSYFENSYVIRKEVNSDNFKNEKSLQKVLDVGIRRILEKRLADYNGNAKEAFSNLEKNPIWKDKEKGVCIKKVRIEALKNAEPLHVKKDHLGKIILDDENKSTPVDFISTGNNHHVAIYEDKDGKLHDKVVSFYEVVSRVNLGLPIIDKSFNSHLDWKFLFSMKQNEMFVFPSEDFNPKEIDIGNPKNNELISKYLFRVQKFSKVTYGNSAVRDYVFRHHLETELIDKKELKGITYYQLKSIGMLEKLVKVRINHIGKIVHIGEY

SEQ ID NO: 65 - protein, 1116 aa, Clostridium spiroforme
MVEFLLKEMKIMGRLVLGLDIGITSVGYGVIDIDKNEFVDYGVRLFKEGTAINNEERRSKRGARRLKRRKTNRIADMKKLLERNGLIDEQYTALNNPYEIRKKGLKNKLSNYELATAILHITKNRGTCLESNADETQDEESTKNILSKNALELKDKYICEIQLARLEESGKIRGINNNFKTEDYLKELSKILENQDLEKETIDKIKEIVARRRRYDQGPGSEKSPTPYGSYRMENGELVHVNLIDMMRGKCSVFPDQLRAPQQSYSAELFNLLNDLNNLKINGEKLSSTEKQKIIDFVNEKGGITVKQLLKLIDVGITEISGFRIDKNEKPLITEFKGYKKVLKVFKNYNQESLLNDKSIVDTIMDINTKIKSIDERSDQLKQVLPSLDTSIINDLASIKGVSGYHSLSLKALNLINNEMLKTEMNQMQVLHQLDIFDKNRVSLKGQRQIYADDNAILSPVAKRAHRETFKVINKLRSIYGEFDSIVIETTRDKNTQDQKKRIKNNQKNYEERNTEVNNFLKEAGYNPENINAKTKMKIRLYIEQDAKSAYTLQDINLKELIEDEKAYEIDHIIPISISLDDSFNNKVLTTHDENQEKGNLTPISAFLKGKFHNGNLNTYKVFIQNNKNLNRKKKEYLLCEDDITRYEVVQNFINRNLVDTSYACRTVMNTLVHYFKDNEINTKVHTIKGQATSTFRKRIGLIKDREEDYFHHAIDALIVASLKKMNLINSYLMKVDFNEMYDEETGEIFNVLPDNSYLDEKYISFVSNLKNIYEESNKYIRGVMIKEKMTYPLIKVSHKIDTKPNRKISDDTIYSTRNVDNQDMLVERIKNIYDPKENAANTLINDIINDNTDKYIMYHKDPQTFDKIKAIVLNHFNEFKTDKNCYIVTKEGLYKLKGTSPLALYYEEFGPITKYAKKNNGPTIHSMKFYSEKLGNHLSITHKYSTVNKKVITKQISPYRTDFYQSPEGKYKFVTVRYKDVAYNAKKDKYIIDHSWYREQKKLKKIADEWIFVCSVHRDELIGIMKADGQKRIFDSSTESDGETLYHDAKTYEILKFTATNNDITGRFEVKPIYCYCKKQLMVSIGTCRKIQKFATDVLGNLYIVKDNVLKLEFK

SEQ ID NO: 66 - protein, 1348 aa, Finegoldia magna
MKSEKKYYIGLDVGTNSVGWAVTDEFYNILRAKGKDLWGVRLFEKADTAANTRIFRSGRRRNDRKGMRLQILREIFEDEIKKVDKDFYDRLDESKFWAEDKKVSGKYSLFNDKNFSDKQYFEKFPTIFHLRKYLMEEHGKVDIRYYFLAINQMMKRRGHFLIDGQISHVTDDKPLKEQLILLINDLLKIELEEELMDSIFEILADVNEKRTDKKNNLKELIKGQDFNKQEGNILNSIFESIVTGKAKIKNIISDEDILEKIKEDNKEDFVLTGDSYEENLQYFEEVLQENITLFNTLKSTYDFLILQSILKGKSTLSDAQVERYDEHKKDLEILKKVIKKYDEDGKLFKQVFKEDNGNGYVSYIGYYLNKNKKITAKKKISNIEFTKYVKGILEKQCDCEDEDVKYLLGKIEQENFLLKQISSINSVIPHQIHLFELDKILENLAKNYPSFNNKKEEFTKIEKIRKTFTFRIPYYVGPLNDYHKNNGGNAWIFRNKGEKIRPWNFEKIVDLHKSEEEFIKRMLNQCTYLPEETVLPKSSILYSEYMVLNELNNLRINGKPLDTDVKLKLIEELFKKKTKVTLKSIRDYMVRNNFADKEDFDNSEKNLEIASNMKSYIDFNNILEDKFDVEMVEDLIEKITIHTGNKKLLKKYIEETYPDLSSSQIQKIINLKYKDWGRLSRKLLDGIKGTKKETEKTDTVINFLRNSSDNLMQIIGSQNYSFNEYIDKLRKKYIPQEISYEVVENLYVSPSVKKMIWQVIRVTEEITKVMGYDPDKIFIEMAKSEEEKKTTISRKNKLLDLYKAIKKDERDSQYEKLLTGLNKLDDSDLRSRKLYLYYTQMGRDMYTGEKIDLDKLFDSTHYDKDHIIPQSMKKDDSIINNLVLVNKNANQTTKGNIYPVPSSIRNNPKIYNYWKYLMEKEFISKEKYNRLIRNTPLTNEELGGFINRQLVETRQSTKAIKELFEKFYQKSKIIPVKASLASDLRKDMNTLKSREVNDLHHAHDAFLNIVAGDVWNREFTSNPINYVKENREGDKVKYSLSKDFTRPRKSKGKVIWTPEKGRKLIVDTLNKPSVLISNESHVKKGELFNATIAGKKDYKKGKIYLPLKKDDRLQDVSKYGGYKAINGAFFFLVEHTKSKKRIRSIELFPLHLLSKFYEDKNTVLDYAINVLQLQDPKIIIDKINYRTEIIIDNFSYLISTKSNDGSITVKPNEQMYWRVDEISNLKKIENKYKKDAILTEEDRKIMESYIDKIYQQFKAGKYKNRRTTDTIIEKYEIIDLDTLDNKQLYQLLVAFISLSYKTSNNAVDFTVIGLGTECGKPRITNLPDNTYLVYKSITGIYEKRIRIK

SEQ ID NO: 67 - protein, 1129 aa, Streptococcus infantarius
MSNGKILGLDIGVASVGVGIIDSKTGNVIHANSRLFSAANAENNAERRGFRGARRLTRRKKHRVKRVRDLFEKYDISTDFRNLNLNPYELRVKGLTEQLTNEELFAALRTIAKRRGISYLDDAEDDSTGSSDYAKSIDENRRLLKTKTPGQIQLERLEKYGQLRGNFTVYDENGEAHRLINVFSTSDYKNEARKILETQSNYNKQITDEFIEDYIEILTQKRKYYHGPGNEKSRTDYGRFRTDGTTLENIFGILIGKCSFYPEEYRASKASYTAQEFNFLNDLNNLKVPTETGKLSTEQKEYLVDFAKKSKALGASKLLKEIAKIVDCSVDDIKGYRVDNKDKPDLHTFEPYRKLKFNLSSIDIDELSRETLDKLADILTLNTEREGIEDAIKRNLPSQFTEEQISEIVQIRKNQSSAFNKGWHSFSAKLMNELIPELYVTSEEQMTILTRLEKFKVNKKSSKNTKTIDEKEITDEIYNPVVAKSVRQTIKIINAAVKKYGDFDKIVIEMPRDKNAEDEKKFIDKKQKENKKEKDDSLKRAAFLYNGTDNLPDGVFHGNKELKTKIRLWYQQGERCLYSGKLISIHDLVHNSNKFEIDHILPLSLSFDDSLANKVLVYAWTNQEKGQKTPYQVIDSMDTAWSFREMKDYVLKQKGLGKKKCEYLLTTENIDKIEVKKKFIERNLVDTRYASRVVLNSLQTALKELGKDTKVSVVRGQFTSQLRRKWNIDKSRETYHHHAVDALIIAASSQLKLWQKQENPMFESYGENQVVNKETGEILSISDDKYKELVFQPPYQGFVNTISSKGFEDEILFSYQVDSKFNRKVSDATIYSTRKAKLGKDKKDETYVLGKIKDIYSQDGFDTFIKRYKKDKTQFLMYQKDPLTWENVIEVILRDYPSEKLSEDGKKTVKCNPFEEYRRENGLICKYSKKGNGTPIKSLKYYDKKLGNCIDITPEKSKNRVVLRQISPWRADIYFNLETLKYELMGLKYSDLSFEKGTGKYHISQEKYDAIREKEGIGKKSEFKFTLYRNDLILIKDTLNNCERMLRFGSKNDTSKHYVELKPLEKGTFDSEEEILPVLGKVAKSGQFIKGLNKPNISIYKVRTDVLGNKFFIKKEGDKPKLDFKNNNK

SEQ ID NO: 68 - protein, 1065 aa, Clostridium perfringens
MNKDINYALGLDIGITSVGWAVINLDLNRIEDLGVRIFNAAENLKDGSSLALPRRLARGRRRLLRRKAYRVERVRKLILKNNILTKEELEGLFKNKEVIDVWEARVKGLDYKLSREEWAKILINFCKRRGFKSNRKNEAKDKEAGQILSSISYNIEKMKETNSRTIGEYIYNEVKNSEDSYAPLRNKFGEYKMCVSRDVIREEIHTLFEKQRELGNNFASDEIEDKYFEIFNSQRPFSNFEDLEKLVGFCTFERKKHKRAPKHCISSEEFTLYEGINKLSIIKDGEKRKLSEEERTLVVNEAFNKKEIKYTTLRKLLGLSEEELFSTLTYSIDKDISKTENTKFVSLKGYHEIKRAIEKGVSKKAWQDIENNRNLLNDIAYVLTLGKTDDEIEKQLRLRNVPEELFESLLDMSFNKFNNLSIYALEKILPFMKEGYQYNEACEKAGYNFKAIYEGVRTKKLPVIEIDEIVNPVVNRALAQTRKVINSVIDKYGSPVRINIELARDLAKNFKDRKLIEKEQKENRANLDKIRENLRELMDKEPTVVEVLKYRLWEQQRGECAYTQSQIPLERLFSPGYCEIDHIIPFSRSFDDSLSNKILVLGSENQRKGNRTPYEYFGEDSERWNSFEIWVKGSYLNYKKKANLLKKKFSEEEQRDWKARNLQDTKYICRYISNFVNNRLEFKESENKQKVITVNGRATAYLRSRWGLNKVREDGDKHHALDAAVVGVTTQGMVQKISKYSKAHELYTVRKNDEFVDVETGECVDVDEYKEIRKDILPRPWRGFSEELKLRLSDNPLEELKKSPIETYNEEFIKENVKPIFVSRVPFRKISGKLFKETIYSERAFKDGYFVSKKSLVDLKRGDLDNFYNYECDKKLYDAISERMKEFNYNGKKAFESPFRKPTKSGKEGPVVRSVKIKSAVPFKDGIPMNEGLVAKEGMVRIDIYEKEGKYFVVPVYRYQLAKGIVPKRAAIAKKDELKWPIMDQTYNFKFSIYKNDLIEVKYDKKGVYFGYYDGFDRNSASLTIEKHDNSERYRSIGLKVGVLEINKYEVDVLGNYHKVKLGGN

SEQ ID NO: 69 - protein, 1195 aa, Elusimicrobium minutum
MQKNINTKQNHIYIKQAQKIKEKLGDKPYRIGLDLGVGSIGFAIVSMEENDGNVLLPKEIIMVGSRIFKASAGAADRKLSRGQRNNHRHTRERMRYLWKVLAEQKLALPVPADLDRKENSSEGETSAKRFLGDVLQKDIYELRVKSLDERLSLQELGYVLYHIAGHRGSSAIRTFENDSEEAQKENTENKKIAGNIKRLMAKKNYRTYGEYLYKEFFENKEKHKREKISNAANNHKFSPTRDLVIKEAEAILKKQAGKDGFHKELTEEYIEKLTKAIGYESEKLIPESGFCPYLKDEKRLPASHKLNEERRLWETLNNARYSDPIVDIVTGEITGYYEKQFTKEQKQKLFDYLLTGSELTPAQTKKLLGLKNTNFEDIILQGRDKKAQKIKGYKLIKLESMPFWARLSEAQQDSFLYDWNSCPDEKLLTEKLSNEYHLTEEEIDNAFNEIVLSSSYAPLGKSAMLIILEKIKNDLSYTEAVEEALKEGKLTKEKQAIKDRLPYYGAVLQESTQKIIAKGFSPQFKDKGYKTPHTNKYELEYGRIANPVVHQTLNELRKLVNEIIDILGKKPCEIGLETARELKKSAEDRSKLSREQNDNESNRNRIYEIYIRPQQQVIITRRENPRNYILKFELLEEQKSQCPFCGGQISPNDIINNQADIEHLFPIAESEDNGRNNLVISHSACNADKAKRSPWAAFASAAKDSKYDYNRILSNVKENIPHKAWRFNQGAFEKFIENKPMAARFKTDNSYISKVAHKYLACLFEKPNIICVKGSLTAQLRMAWGLQGLMIPFAKQLITEKESESFNKDVNSNKKIRLDNRHHALDAIVIAYASRGYGNLLNKMAGKDYKINYSERNWLSKILLPPNNIVWENIDADLESFESSVKTALKNAFISVKHDHSDNGELVKGTMYKIFYSERGYTLTTYKKLSALKLTDPQKKKTPKDFLETALLKFKGRESEMKNEKIKSAIENNKRLFDVIQDNLEKAKKLLEEENEKSKAEGKKEKNINDASIYQKAISLSGDKYVQLSKKEPGKFFAISKPTPTTTGYGYDTGDSLCVDLYYDNKGKLCGEIIRKIDAQQKNPLKYKEQGFTLFERIYGGDILEVDFDIHSDKNSFRNNTGSAPENRVFIKVGTFTEITNNNIQIWFGNIIKSTGGQDDSFTINSMQQYNPRKLILSSCGFIKYRSPILKNKEG

SEQ ID NO: 70 - protein, 1101 aa, Akkermansia muciniphila
MSRSLTFSFDIGYASIGWAVIASASHDDADPSVCGCGTVLFPKDDCQAFKRREYRRLRRNIRSRRVRIERIGRLLVQAQIITPEMKETSGHPAPFYLASEALKGHRTLAPIELWHVLRWYAHNRGYDNNASWSNSLSEDGGNGEDTERVKHAQDLMDKHGTATMAETICRELKLEEGKADAPMEVSTPAYKNLNTAFPRLIVEKEVRRILELSAPLIPGLTAEIIELIAQHHPLTTEQRGVLLQHGIKLARRYRGSLLFGQLIPRFDNRIISRCPVTWAQVYEAELKKGNSEQSARERAEKLSKVPTANCPEFYEYRMARILCNIRADGEPLSAEIRRELMNQARQEGKLTKASLEKAISSRLGKETETNVSNYFTLHPDSEEALYLNPAVEVLQRSGIGQILSPSVYRIAANRLRRGKSVTPNYLLNLLKSRGESGEALEKKIEKESKKKEADYADTPLKPKYATGRAPYARTVLKKVVEEILDGEDPTRPARGEAHPDGELKAHDGCLYCLLDTDSSVNQHQKERRLDTMTNNHLVRHRMLILDRLLKDLIQDFADGQKDRISRVCVEVGKELTTFSAMDSKKIQRELTLRQKSHTDAVNRLKRKLPGKALSANLIRKCRIAMDMNWTCPFTGATYGDHELENLELEHIVPHSFRQSNALSSLVLTWPGVNRMKGQRTGYDFVEQEQENPVPDKPNLHICSLNNYRELVEKLDDKKGHEDDRRRKKKRKALLMVRGLSHKHQSQNHEAMKEIGMTEGMMTQSSHLMKLACKSIKTSLPDAHIDMIPGAVTAEVRKAWDVFGVFKELCPEAADPDSGKILKENLRSLTHLHHALDACVLGLIPYIIPAHHNGLLRRVLAMRRIPEKLIPQVRPVANQRHYVLNDDGRMMLRDLSASLKENIREQLMEQRVIQHVPADMGGALLKETMQRVLSVDGSGEDAMVSLSKKKDGKKEKNQVKASKLVGVFPEGPSKLKALKAAIEIDGNYGVALDPKPVVIRHIKVFKRIMALKEQNGGKPVRILKKGMLIHLTSSKDPKHAGVWRIESIQDSKGGVKLDLQRAHCAVPKNKTHECNWREVDLISLLKKYQMKRYPTSYTGTPR

SEQ ID NO: 71 - protein, 1187 aa, Bifidobacterium longum
MLSRQLLGASHLARPVSYSYNVQDNDVHCSYGERCFMRGKRYRIGIDVGLNSVGLAAVEVSDENSPVRLLNAQSVIHDGGVDPQKNKEAITRKNMSGVARRTRRMRRRKRERLHKLDMLLGKFGYPVIEPESLDKPFEEWHVRAELATRYIEDDELRRESISIALRHMARHRGWRNPYRQVDSLISDNPYSKQYGELKEKAKAYNDDATAAEEESTPAQLVVAMLDAGYAEAPRLRWRTGSKKPDAEGYLPVRLMQEDNANELKQIFRVQRVPADEWKPLFRSVFYAVSPKGSAEQRVGQDPLAPEQARALKASLAFQEYRIANVITNLRIKDASAELRKLTVDEKQSIYDQLVSPSSEDITWSDLCDFLGFKRSQLKGVGSLTEDGEERISSRPPRLTSVQRIYESDNKIRKPLVAWWKSASDNEHEAMIRLLSNTVDIDKVREDVAYASAIEFIDGLDDDALTKLDSVDLPSGRAAYSVETLQKLTRQMLTTDDDLHEARKTLFNVTDSWRPPADPIGEPLGNPSVDRVLKNVNRYLMNCQQRWGNPVSVNIEHVRSSFSSVAFARKDKREYEKNNEKRSIFRSSLSEQLRADEQMEKVRESDLRRLEAIQRQNGQCLYCGRTITFRTCEMDHIVPRKGVGSTNTRTNFAAVCAECNRMKSNTPFAIWARSEDAQTRGVSLAEAKKRVTMFTFNPKSYAPREVKAFKQAVIARLQQTEDDAAIDNRSIESVAWMADELHRRIDWYFNAKQYVNSASIDDAEAETMKTTVSVFQGRVTASARRAAGIEGKIHFIGQQSKTRLDRRHHAVDASVIAMMNTAAAQTLMERESLRESQRLIGLMPGERSWKEYPYEGTSRYESFHLWLDNMDVLLELLNDALDNDRIAVMQSQRYVLGNSIAHDATIHPLEKVPLGSAMSADLIRRASTPALWCALTRLPDYDEKEGLPEDSHREIRVHDTRYSADDEMGFFASQAAQIAVQEGSADIGSAIHHARVYRCWKTNAKGVRKYFYGMIRVFQTDLLRACHDDLFTVPLPPQSISMRYGEPRVVQALQSGNAQYLGSLVVGDEIEMDFSSLDVDGQIGEYLQFFSQFSGGNLAWKHWVVDGFFNQTQLRIRPRYLAAEGLAKAFSDDVVPDGVQKIVTKQGWLPPVNTASKTAVRIVRRNAFGEPRLSSAHHMPCSWQWRHE

SEQ ID NO: 72 - protein, 166 aa, uncultured Termite
MNKVQEIEYKKIREKLADREYRIGLDLGVGSIGYVVVSLKECNDLSYLPEDIILSGSRIFKSSIGAVERREFRLQRNSHRHHRERMRFLWQLLAEKQLALQSSKDLEKKENSADCETSQKRFPINILKEDPYILRYKALEEKLSLFQLGYVLYHIANHSNTAYENT

SEQ ID NO: 73 - protein, 1032 aa, uncultured Termite
MLYHIANHRGTDSVRSFLEYDDDKIKENTLTAKIAKETKKVIDAKKYRTFGEYLYKGKIEKFQQNIRKKVSNRKTPANKNKEFAVTRDVIIKETEKILASQKQYYTYILTDEYIKKIKDAISYQTEKLIPESGYCPYFKDEKRLPRSHKLNEYRRMYEALNNAKYFDPVLDENTGEILSYQEKEFSREEKKILFDEVLLKGMELTESGAKKLLYHLPDGCEVQLQGRDKTTQKIKGYALVDLEASPFWLRLSQQQQDEFLYDWNSLPLEKLKPKLTNYYSLTESEVDETFQEIKLPSNYASVGKKAMEILLTYIKDGCSYTEALEKAVSEGKLKVDKQTMIYDSLPYYGKILKESTQKLIGKAFSKQFADRNYKEPDTNKNEREFGKIANPVVHQTLNELRKLINEIITVFGKKPLEIGLETTRELKKSKKNREYLSKQQNKNEYARNRIYKEYIEPHLSQIKSRQENPSKYISKFELLEEQNFICPFCSEKITPDDIINSKVDVEHIFPIEESEDITKNNLVIAHNECNADKGKKSPFDAFGDKTSGKYRWNCILHNAQKNLPHKVWRFYQGSLEKFLENKPMSRRFGTDNSYISKIAARYLACLFNDPYHSEIFCIKSSLIAQLRIAWDLNSIMVPLVKNILSEKELEEFKISKNKKIRIDNRHHALDAIVIAYANRGYHNFLNRIHAKEYKINYREKSWLSKILLPPLNRDLEDFKISVKDSIEKANVSIKHDHNTNGSLVKATAYKVYYSGAGEYIITTSKNVEEISFKEKEDPKDTLYRALCKFECRDIDIKDEKLIKKLKYNSTLYKKVQNNLSKAKQELEQDNKKTEEEGKKSQKITEVRIYKKACSLVKGQYIQCGSRLKDKFFAVKEPTEIKTGLGYDTGDNLFLDLYYDKTGKLCGEIIRKVNFNRNKPNYQKEGYTLFERIYQSDILEVDTSEDRISLKNKTGSAPSDRTFIKVNTFTEVNAYFDGKRDKIQIFFGNLLKSSFKNDSFFISSMQKYNVRKVILTSLGIIKYRSQILKNKEV

SEQ ID NO: 74 - protein, 1032 aa, uncultured Termite
MKKRILGLDIGIASVGWALVEFDDEFQDNKKKGTIIKSGVRIFTRAETPKERESLAKPRREARSQRRRIRRRVERLNSIRELFVKNGVVEEWSVSKKNPNNIYITLNQIKTPWQLRMESLDRKLTNEQFAVVLTHLAKHRGYKSLRKDDKAGKVLEAISQNKKRLNDSDYRTLGEMFCKNESYKEHKRNKGGEYINSVARELIEEEVEKIFVKQREKGNNFADVNTEREYLKIAFSQKPAGSISKMVGFCTFENGEKRAPRDSYSAELFKVLCTINNTTFTDMKTGEIRSFSKEEIGKTLETVKNVKDVKYAKIRKDLGLEDSVKFSGVDYRENAKSKGEGEIFVSMKTYHEIKSKIEKLSKEKWDNLKGNTELLDSIVNIIANLKDDESIKKEFQKLKIDEDIIDVLLNFEFKKFINLSFKALRKIIPFQFQGQKYITASTSAGYSLKQEGIKNKLVPPAKENINVAVVARAFAQTRKVINAVIRKYGQFDQINIELATELKNSKFDRSKIEEGQKKFQSQKDKIFKEVQELRGGMTPSSSLLLKYRLWREQDERCVYSGRKISFEDLLDTGFLDIDHIIPYSKSMDDSFNNKVLCLAEENRNKKNDIPFNYYQRIDRDWNLLISIITSMKNMKIAKKSRLLKQELSDIEGFIERNINDTRYATRYIKDFLENNLEFKENEFIKVKVQARSGGLTSVLSYNWGMSKDREESYFHHAKDAIIVACSTQGMVQYISKISQQYENDKDKMKKIKDKTENCIPKPWDSFRADVEESIEGIFVSFAPRHKVTGSAHKETIYSKKHLEKERYVTVKKSLDKIKLSDLENIPCNENCGIIRVLKERLEKFKNDSLKAFADPVHMPTKCPNKKGPVIRSVKIKESNKTGIEVRKGLAERGEMVRVDVFIKDKKYYLVPIYVSDFKNKDLPNKAIAALKLENEWIMIDKTYSFKFSLFKDDLIKIKKKKEEIFGYFGGVHRSTGTIKIKSRHKPKEIDEGIGSRCLLDFRKFQVDVLGNYTEVKHEKRMPAYITRKDKKH

SEQ ID NO: 75 - protein, 1361 aa, Lactobacillus casei
MTKLGKPYGIGVDIGSNSIGFAAVDENSHLIRLKGKTVIGARLFEEGKAAADRRASRTTRRRLSRNRWRLSFLRDFFESHITPTGPNFFMRQKYSEISPKDKARYKYEKRLFNDRTDAEFYQQYPTMYHLRNRLLTDPSKADVREIYFAIHHILKSRGHFLTSGYAKDFNTNKVALNEIFPALQDAYAQVYPDLDITFDENKVNEFKTVLLNEKATPSDTQRALVNLLLAEDGDKDILKQQKQVLTEFAKAVVGLKTKLNVALGTEVDSSEATVWNFSLGQLDDKWAGIESAMTDEGTEILDQIRDLYRARLLNGIVPAGKTLSQAKVDDYAQHHEDLELFKDYLKQLEDDGTAKAIRQLYDRYIDGDDAKPFVREDFVKALTKEVTAHPNAKSPELLERLAQPDFMLKQRNKANGAIPVQMQQRELDQIIKNQSVYYDWLAAPNPVEKHRKSMPYQLDELLNFRIPYYVGPLVTAKEQKAAQGGVFAWMVRKDPDGNITPYNFDEKVDREASANTFIQRMKTTDTYLIGEDVLPKQSLLYQRYEVLNELNNVRVNNEKLSIEQKQQVIRELFERHNSVTIKQFAENLRAHGDYAHIPEIRGLADEKRFLSSLSTYRQLKSLLPDAIDDPAKQADIENIIAWSTVFEDAAIFKTKLKEINWLDSQTITKLSNIRYRGWGQFSHKFLNGLTLGNGHTIIQELFLSNNNLMQILTDETLQKKMTELNADKLKAANINDAIDDAYTSPSNKKALRQVLRVIEDIKRAADGQDPSWLYVETADGGGTPGKRTRARQHQLQEIYANAAHELIDSAVRGELEDKIADKADFNDRLVLYFMQGGRDIYTGTPLNIDQLSSYDIDHILPQSLIKDNSLDNRVLVHAIINREKNATFASTIYAQKMNATWRQWHEAGLISGRKLRNLQMRPDQIDKYASGFVARQLVETRQIIKLTEQIVAAQYPETKIIAVKAGLSHQLREELEFPKNRDVNHYHHAFDAFLAARIGTYLLKRFPNLQAFFTYGKFKKADVKKLRGFNFIRDITHAEDKIVVKDTGEVIWDKKRDVDELDRIYNFKRMLITHEVHFEKADLFKQTVYGAKDSKEAGGKKQLISKKKGYPVDIYGGYTQETGSYLSVVRLTKKAMYAVVKVSTRDAAKLAVAKSISEQKENETLNDIIDEKLSKISKNGKITHELFEVVLPRVGQKTLFKNSKYNLFLVNSDTYMHNYQELWMPREYQKMWKDISLSKYGDAQTEDQLDQIFGFIVSQVNSYFNLYDINQFRKKLNDAADKFATLPMRDTDDMQGKIATIGQLLIGLQANAARSDLRNLDIKTPLGLLQIPNGISLDSDTSVVYQSPTGLLEREVHLSDL

SEQ ID NO: 76 - protein, 1348 aa, Streptococcus equi
MKKPYTIALDIGTNSVGWVVVTDDYRVPTKKMKVLGNTERKTIKKNLIGALLFDSGDTAEGTRLKRTARRRYTRRKNRLRYLKEIFTEEMAKVDDGFFQRLEDSFYVLEDKEGNKHPIFANLADEVAYHKKYPTIYHLRKELVDNPQKADLRLIYLAVAHIIKFRGHFLIEGTLSSKNNNLQKSFDHLVDTYNLLFEEQRLLTEGINAKELLSAALSKSKRLENLISLIPGQKKTGIFGNIIALSLGLTPNFKANFGLSKDVKLQLAKDTYADDLDSLLAQIGDQYADLFLAAKNLSDAILLSDILTESDEITRAPLSASMVKRYREHHKDLVTLKTLIKDQLPEKYQEIFLDKTKNGYAGYIEGQVSQEEFYKYLKPILARLDGSEPLLLKIDREDFLRKQRTFDNGSIPHQIHLEELHAILRRQEVFYPFLKDNRKKIESLLTFRIPYYVGPLARGHSRFAWVKRKFDGAIRPWNFEEIVDEEASAQIFIEKMTKNDLYLPNEKVLPKHSLLYETFTVYNELTKVKYATEGMTRPQFLSADQKQAIVDLLFKTNRKVTVKQLKENYFKKIECWDSVEITGVEDSFNASLGTYHDLLKIIQDKDFLDNPDNQKIIEDIILTLTLFEDKKMISKRLDQYAHLFDKVVLNKLERHHYTGWGRLSGKLINGIRDKQSGKTILDFLKADGFANRNFMQLIHDSELSFIDEIAKAQVIGKTEYSKDLVGNLAGSPAIKKGISQTIKIVDELVKIMGYLPQQIVIEMARENQTTAQGIKNARQRMRKLEETAKKLGSNILKEHPVDNSQLQNDKRYLYYLQNGKDMYTGDDLDIDYLSSYDIDHIIPQSFIKNNSIDNKVLTSQGANRGKLDNVPSEAIVRKMKGYWQSLLRAGAISKQKFDNLTKAERGGLTQVDKAGFIQRQLVETRQITKHVAQILDSRFNTEFDDHNKRIRKVHIITLKSKLVSDFRKEFGLYKIRDINHYHHAHDAYLNAVVAKAILGKYPQLAPEFVYGDYPKYNSFKERQKATQKMLFYSNILKFFKDQESLHVNSDGEEIWNANKHLPIIKNVLSIPQVNIVKKTEVQTGGFYKESILSKGNSDKLIPRKNNWDTRKYGGFDSPTVAYSVLVIAKMEKGKAKVLKPVKEMVGITIMERTAFEENPVVFLEARGYREIQEHLIIKLPKYSLFELENGRRRLLASASELQKGNELFLPVDYMTFLYLAAHYHELTGSSEDVLRKKYFVDRHLHYFDDIIQMINDFAERHILASSNLEKINHTYHNNSDLPVNERAENIINVFTFVALGAPAAFKFFDATIDRKRYTSTKEVLNATLIHQSVTGLYETRIDLSQLGEN

SEQ ID NO: 77 - protein, 1341 aa, Ruminococcus lactaris
MGKGYYVGLDMGTGSVGWAVTDESYQILRRHGKAMWGVRLFESAKTAEERRMFRTGRRRLDRRGWRIEILQEIFAEEISRVDPGFFLRMKESKYYPEDKRDIQGNCPELPYTLFVDKTFTDKDFHKKYPTIYHLRKMLMETEDTPDMRLVYLALHHMMKHRGHFLLSGDISQVTEFKNTFNQFIENIRNEEMDFEIELDESAVQMIEETLKDKNLTRSAKKSKLVKGLNAKNVRDKAFLTLLSGGTVKLSDLFGMEELNEGERPKISFADNGYEEYAAVVEMELGELYYIVESAKAVYDWAILSDILGGSTSVSDAKVRAYEKHKADLKYLKAVVKEYFPKEVYNAVFVESSDKLNNYPAYIGMTKKNGKKVSLEGKRCSREEFMDFLKKNIVVKLPDEEAKMYLQSELEKDSFLPKQVNKDNGVIPYQVHKYELKKILDNLGDKIPFLKENAEKIEKLFSFRIPYYVGPLRTGNGENSKFAWAERKSTEKIYPWNFENVIDVEQSAENFIRRMTNKCTYLIGEDVLPKDSLLYSKFMVLNELNNLRLDGQKISVELKQKIYRDVFCRSRKVTQKKLKSYLIREGIAGKNVELTGIDGDFKGSLTAYHDFKEKLIDVELTQKEKEEIILNIVLFGDDKKLLKQRLKKKFPQLTEKQINTVTALSYKGWGRLSKKLLEEVTVPAPETGEVWNIITALWETNDNFMQLLSKEYQFSDRIEEFNEEKADPEVSYQTIEDLYVSPAVKRQIWQTLQIIQEIEKVMGEKPKRVFVEMAREKQENKRTESRKKTLSDLYTKCKKEEPEWIEALCTSLEKHEEHQLRSDKLYLYYTQKGRCMYSGEPIDLEDLWDNTKYDIDHIYPQSKTMDDSLKNRVLVKKEYNAKKSDTYPIAADIQKKMMPFWKSLLTGGFIPKEKYDRLVRNNPLDANELAGFIERQIVETRQSTKAVAEILKKILPDTEIVYVKAKTVSKFRQDFDFIKVRDMNDLHHAKDAYLNIVVGNVYFVKFTKNAAWFVKENPGRTYNLEKMFIWDVARDGEIAWKAGKSGSIVQVRAMMEKNHILVTRRSYEVKGGLFDQQILKKGKGQVPVKESDERLRDIGKYGGYNKAAGVYFMLVSSKDKKGKEQRTIEFVPIYLKDRVEKDMESARNYLMEERGLREPKILIKKIKIDTLFKVDGFYMWLSGRTSNQLIFKGANQLILSKEDMKTLKKVVKYIQRQKEDKNVKISMRDGITEEELLKLYETFLDKIRHSIYGARLSSQEKTLVNGKEKFIDLSVEAKCQVLYEILHLFQCQSGAANLKMIGGPASAGILVMNNNISKCKNISIVNQSPTGIYEKEIDLLRV

SEQ ID NO: 78 - protein, 1003 aa, Gluconacetobacter diazotrophicus
MIDESLTFGIDLGIGSCGWAVLRRPSAFGRKGVIEGMGSWCFDVPETSKERTPTNQIRRSNRLLRRVIRRRRNRMAAIRRLLHAAGLLPSTDSDALKRPGHDPWELRARGLDKPLKPVEFAVVLGHIAKRRGFKSAAKRKATNISSDDKKMLTALEATRERLGRYRTVGEMFARDPDFASRRRNREGKYDRTTARDDLEHEVHALFAAQRRLGQGFASPELEEAFTASAFHQRPMQDSERLVGFCPFERTEKRAAKLTPSFERFRLLARLLNLRITTPDGERPLTVDEIALVTRDLGKTAKLSIKRVRTLIGLEDNQRFTTIRPEDEDRDIVARTGGAMTGTATLRKALGEALWTDMQERPEQLDAIVQVLSFFEANETITEKLREIGLTLAVLDVLLTALDAGVFAKFKGAAHISTKAARNLLPHLEQGRRYDEACTMAGYDHAASRLSHHGQIVAKTQFNALVTEIGESIANPIARKALIEGLKQIWAMRNHWGLPGSIHVELARDVGNSIEKRREIEKHIEKNTALRARERREVHDLLDLEDVNGDTLLRYRLWKEQGGKCLYTGKAIHIRQIAATDNSVQVDHILPWSRFGDDSFNNKTLCLASANQQKKRSTPYEWLSGQTGDAWNAFVQRIETNKELRGFKKRNYLLKNAKEAEEKFRSRNLNDTRYAARLFAEAVKLLYAFGERQEKGGNRRVFTRPGALTAALRQAWGVESLKKQDGKRINDDRHHALDALTVAAVDEAEIQRLTKSFHEWEQQGLGRPLRRVEPPWESFRADVEATYPEVFVARPERRRARGEGHAATIRQVKERECTPIVFERKAVSSLKEADLERIKDGERNEAIVEAIRSWIATGRPADAPPRSPRGDIITKIRLATTIKAAVPVRGGTAGRGEMVRADVFSKPNRRGKDEWYLVPVYPHQIMNRKAWPKPPMRSIVANKDEDEWTEVGPEHQFRFSLYPRSNIEIIRPSGEVIEGYFVGLHRNTGALIPTPVGPDSYVIA

SEQ ID NO: 79 - protein, 1368 aa, Streptococcus pyogenes
MDKKYSIGLDIGTNSVGWAVITDDYKVPSKKFKVLGNTDRHSIKKNLIGALLFDSGETAEATRLKRTARRRYTRRKNRICYLQEIFSNEIAKVDDSFFHRLEESFLVEEDKKHERHPIFGNIVDEVAYHEKYPTIYHLRKKLADSTDKADLRLIYLALAHMIKFRGHFLIEGDLNPDNSDVDKLFIQLVQTYNQLFEENPINASRVDAKAILSARLSKSRRLENLIAQLPGEKRNGLFGNLIALSLGLTPNFKSNFDLAEDAKLQLSKDTYDDDLDNLLAQIGDQYADLFLAAKNLSDAILLSDILRVNTEITKAPLSASMIKRYDEHHQDLTLLKALVRQQLPEKYKEIFFDQSKNGYAGYIDGGASQEEFYKFIKPILEKMDGTEELLAKLNREDLLRKQRTFDNGSIPHQIHLGELHAILRRQEDFYPFLKDNREKIEKILTFRIPYYVGPLARGNSRFAWMTRKSEETITPWNFEEVVDKGASAQSFIERMTNFDKNLPNEKVLPKHSLLYEYFTVYNELTKVKYVTEGMRKPAFLSGEQKKAIVDLLFKTNRKVTVKQLKEDYFKKIECFDSVEISGVEDRFNASLGTYHDLLKIIKDKDFLDNEENEDILEDIVLTLTLFEDREMIEERLKTYAHLFDDKVMKQLKRRRYTGWGRLSRKLINGIRDKQSGKTILDFLKSDGFANRNFMQLIHDDSLTFKEDLQKAQVSGQGDSLHEHIANLAGSPAIKKGILQTVKVVDELVKVMGRHKPENIVIEMARENQTTQKGQKNSRERMKRIEEGIKELGSDILKEYPVETTQLQNEKLYLYYLQNGRDMYVDQELDINRLSDYDVDHIVPQSFLKDDSIDNKVLTRSDKNRGKSDNVPSEEVVKKMKNYWKQLLNAKLITQRKFDNLTKAERGGLSELDKAGFIKRQLVETRQITKHVAQILDSRMNTKYDENDKLIREVRVITLKSKLVSDFRKDFQFYKVREINNYHHAHDAYLNAVVGTALIKKYPKLESEFVYGDYKVYDIRKMIAKSEQEIGKATAKYFFYSNIMNFFKTEITLANGEIRKRPLIETNGETGEIVWDKGRDFATVRKVLSMPQVNIVKKTEVQTGGFSKESILPKRNSDKLIARKKDWDPKKYGGFDSPTVAYSVLVVAKVEKGKSKKLKSVKELVGITIMERSSFEKDPVDFLEAKGYKEVRKDLIIKLPKYSLFELENGRKRMLASAGELQKGNELALPSKYVNFLYLASHYEKLKGSPEDNEQKQLFVEQHKHYLDEIIEQISEFSKRVILADANLDKVLSAYNKHRDKPIREQAENIIHLFTLTNLGAPAAFKCFDTTIGRNRYKSIKEVLDATLIHQSITGLYETRIDLSQLGGD

SEQ ID NO: 80 - protein, 1504 aa, Bacteroides dorei
MKNIVGLDLGTNSIGWAVVNGSVNDDGSEQLVKIQASGSRIIPMDAAMIGDFNKGNSISQTAERTRLRGVRRLSERYLLRRERLHRILDILGFLPFHFAQDLDRHGKIVKGKEPKLAWRKNEAGQFEFIFQDSFKEMLEDFKLNYPNLITDDKKVPYDWTIYYLRKKGLTSKISKEELAWILLNFNQKRGYYQLRGEEEEENKDKLVEFYALKVVAVEDSGEKKGKDIWYNVHLENGWVYRRTSNMSLDWVGKTKEFIVTTDLEKDGTPKKDKEGNVKRSFRAPKEDDWSLVKKKTEADIDQTHKTVGAYIYDTLLGNPSQKIRGRLVRTIERKYYKEELKLILEKQKEFHLELQDRALYAACIEELYPINEAHRNNVGNRDFTYLFLEDILFYQRPLKSKKSLIDNCPYEENQGLDKETGEIKSFPVKCIAKSHPLFQEFRLWQFIINLRIYRKDLAQDVDVTNELLKTEEDYVALFDWLNGKKEIDQKAFLKYPVFGLKKEIENYRWNYVQDKPYPCNETRSLMLARLEKCDISIEFLTKENEEALWHILYSVEDKNEIVKALQKFADKHDLNASFVDVFQKFPPFKKEYGSYSAKAIKKLLPLMRMGKYWSENSIDKGTRERIDKIITGEYDEKIENRVREKAIHLADVSDFKGLPLWLVCYIVYGRHSEAKEIIQWKSPADIDSYLRSFKQHSLRNPIVEQIIIETLRVVRDIWKQVGNIDEIHVELGREMKNPADKRKKMTQQMSENENTNLRIKYLLTEFLNPEYEVENVRPYSPSQQDILRIYEEGVLNSVSDLPEEISDILKKFTETDLKKRPSRSEVLRYKLWLEQKYRSPYTGEVIPLGKLFTPAYEIEHVIPQSYYFDDSFSNKVICEAEVNKLKSNLLGHEFIVKHHGEIVELPFGKKVRIFTVDEYEQFVKDNYSRTRSKMKKLLMDDIPEEFVTRQLNDSRYISKVVKSLLSNIVREKGEEEAISKNVIPCTGGVTDRLKKDWGINEVWNKIILPRFQRLNELTGTNKFTTKNVGIQEIPTMPLELQKGFNKKRIDHRHHAMDAIIIACANRNIINYLNNKSATAKAELSRYDLQKMLCDKAKTDNNGNYKWVIRKPWASFTQDTYLALENIIVSFKQNLRVINKATNRFLHYNEEGKKIFVKQGKGDNWAIRKSMHKDTVFGEVNLRRIKTVALNEAMKNPQSIVVKDFKRKLLELWNLGFDAKRIKKYFEDNRETWSDINLSKIEVYYFSKDTKDRFFATRKPLDTSFDRKKIENNITDTGIQKILLRHLELKDNNPDIAFSPDGIDEMNRNIIQLNNGKYHQPIIKIRWYEQADKFAVGQTGNKSSKFVEAAKGTNLFFAVYESNILDKKTNTIIKKRNYATIPLNVAIERQKQGLPVAPEDENGNDPIFVLSPNDLVYLPTDDELANGIIAQPLDRGRIYKMVSSSGEQCFFIKHIVANVLVDKFEFSPLNKMERALTGEMIKMICIPIKVDRLGNVLESSSSYKK

SEQ ID NO: 81 - protein, 1426 aa, Capnocytophaga sputigena
MKNILGLDLGITSISFAHIVEDENKEKSEIKELGVRIVSLTTDEQSDFEKGKSITTNANRTLKHGARLNLDRYQQRRKYLIDLLQKANLITSSSILAENGKNTTHSTWQLRAKAVTERIEKEEFARVLLAINKKRGYKSSRKAKTEDEGQAIDGMAIAKRLYDENLTPGQLSLQLLQQNKKLLPDFYRSDLQREFDLVWNFQKQFYPDILTDSFYKELQGKGKDATSKAFSKRYHFDTAENKGSKESVRLQAYQWRAEAISKQLSKEEVAYVLTEINNNLNNASGYLGAISDRSKELYFNRQTVGQYLYAQLQENRHNSLKNKVFYRQDYLDEFERIWETQASFHKELTDELKKQIRDVVIFYQRKLKSQKGLISFCEFESKEIEIEKDGKTITKTIGARVVPKSSPLFQEFKIWQILNNVTCKRKGIRKKKSSAKSTELDLFNEPSQTIFSLDMECKQLLFDELNLKGDLKSDKVLKLLGYSPQEWEINYNQLEGNRTQKALYEAYLKIVEMEAHDVKDILQIKSAKDDWSLDESPLSASEIKEKVKDIFQALGICTKILYFDPLLPVKEFEKQDSYQLWHLLYSYESDDSTSGNETLYRILEKKYAFKREHARILANVALQDDYGSLSTKAIRKIYPNIKENQYSKACELAGYKHSKLSLTTEELEARELKNIIPLLKKNALRNPVVEKILNQMINVVNALIEKNSERDAEGKITKYFHFDEIRIELARELKKNAQKRYEMTQNINKAKLEHQKISEILQKKFGIKNPTKSDIIRYRLYQELEHNGYKELYTNAPIARDMLFSKNIEIEHIVPKARVFDDSFSNKTLTFHRINSNKGEYTAFDYITSLNSEEELNQYLTRVENAYKTKSISLTKYKNLLKKASEIGDGFINRDLRDTQYIAKKAKEILFQVTKNVLSTSGSITDRLREDWGLVDVMKELNMPKYQSLGLTEVEERKEGNKVTVIKNWTKRNDHRHHAMDALTVAFTKPSYIQYLNHLNARKDENNKNYSVILAIEEKETIKVPTNNGKNKRVFIEPIPNFRQVAKKHLEEIFISHKAKNKVVTKNVNKPAGTDKQQITLTPRGQLHKETIYGKYQYYVNKEEKVGVKFDERTITKVSNPLYREALLKRLQANDNDPKKAFTGKNALSKNPIYLDETKTKTLPEKVNLTYLEEDFSIRKDISPDNFKDLKSIEKVIDQGVKRILIKRLQDYDNDPKKAFVDLEKNPIWLNKEKGIAIKRVTISGVSNAQPLHIGKDHLGKTTLNKEGNEIPVDYVSTGNNHHVAIYRDKEGNLQEQIVSFFEAVVRTQQGLPIIDKTYKQEEGWQFLFTMKQNEMFVFPNATTGFNPAEIDLLDPKNKKLISPNLFRVQKIATKDYFFRHHLETNVETDNVLKNTTWKREGLSGLKDIVKVRINHLGDIVSIGEY

SEQ ID NO: 82 - protein, 1443 aa, Parabacteroides johnsonii
MIKLLYLEKLKQYTMKKILGLDLGTSSIGWALVNEAENSDEVSSIIKLGVRVNPLTVDEMQNFEKGKSITTNADRTLKRSMRRNLQRYKLRRDALIELLKKVGFITDKTILSEQGNRTTFETYRLRAKAAEEEISLKELARVLLMINKKRGYKSSRKAKGEEEGALIDGMEIAKKLYDEDLTPGQLCLQLLESGKKFFPDFYRSDLQEEFNKIWDFQKQFNLFSFCDVAKEEVKGKNKSQTWAILAKYFVETKKVNVWNEHEAQTENREEVYKLVGLKRTVKGEELKKENYRWRVQALTEQLDLEKIAVVLQEINGQISASSGYLGAISDRSKVLYFNRQTVGQYQMAELNKNPNMSLRNMVFYRQDYLDEFNVIWEKQAEFHKELTPELKKEIRDIIIFYQRRLKSQKGLISFCEFENREVVVEKEGKKQTKIIGCKVIPRSHPLFQEFKIWQTLNNIEVFVGEKKGKRKKSNVSSDLFGDTEDALITEGRRFLYQEEKKILAKELSIKKGLTKAEILRLLFENPQELDINFKQIDGNQTGFALFSAYSNMIEKYGYEPLDFKKPAEDLISQLKTVFTDLGWNTDLLFIDLDKENKEWEKQPYFRLWHLLYSFEGDNTPTGNGKLIEKIMQLCGIEKEYAIELANVSLQDDYGSLSAKAIKKILLYLKEGNQYDMACEYAGYRHSKSSLTKEEIENKVLKDKLEILPKNSLRNPVVEKILNQMVNVINTVMEVYGRPDEIRVELARELKKSAKEREELTKAVAKNTREHEEIRKVLQSEFGMINVSRNDIIRYKLYEELKDNGYKTLYSNQYIPREKLFSKEIDIEHIIPQSRLFDDSLSNKTLEYKSINIEKGNKTAYDFVKEKYGEEGLQQYLNRCENLCKDKKAKLRKLKMELNEIPDGFIDRDLRNTQYIAKKALSMLTEICRRVVATTGSITDKLREDWQLVDVMKELNLPKYEALGLVEVYEDKDGRKIKRIKDWTKRNDHRHHAMDALTVAFTKDVFIQYFNNKNAAWESDSKEHTNIVGIKTRYFESGKAVPPIPLGQFRVEAKCHLENLLVSIKAKNKVVTTNVNCIKKKGGTYKNTQQTPRGQLHLETIYGSHNQYVTKIEKVNASFDAVKIATVSKQDYRNALLKRLEVFGNDPKKAFTGKNSLEKNPIYLDRAQTIQVPDKVQTVELETAYTIRKPVDPTLNVDKVVDKKIRLILEQRLKEYGGDAKKAFVNLDENPIWLNEEKGISIKRVTIRGISKAQALHDKKDKDGNFILDETGKRIPVDFVNTGNNHHVAIYRKPVLDKKGQVIFDDEGNPMYELDEDVVPFFEAVTRANLGIPIIDKDYKKSEGWQFLFSMKQNEYFVFPNEKTGFNPKEVDLLDPDNYAMISPNLFRVQKIGLNDYTFRHHLETTIQNDLKFITWIRCGKSGIKDIVKVRINHIGQIVSVGEY

SEQ ID NO: 83 - protein, 984 aa, Campylobacter jejuni
MARILAFDIGISSIGWAFSENDELKDCGVRIFTKVENPKTGESLALPRRLARSARKRLARRKARLNHLKHLIANEFKLNYEDYQSFDESLAKAYKGSLISPYELRFRALNELLSKQDFARVILHIAKRRGYDDIKNSDDKEKGAILKAIKQNEEKLANYQSVGEYLYKEYFQKFKENSKEFTNVRNKKESYERCIAQSFLKDELKLIFKKQREFGFSFSKKFEEEVLSVAFYKRALKDFSHLVGNCSFFTDEKRAPKNSPLAFMFVALTRIINLLNNLKNTEGILYTKDDLNALLNEVLKNGTLTYKQTKKLLGLSDDYEFKGEKGTYFIEFKKYKEFIKALGEHNLSQDDLNEIAKDITLIKDEIKLKKALAKYDLNQNQIDSLSKLEFKDHLNISFKALKLVTPLMLEGKKYDEACNELNLKVAINEDKKDFLPAFNETYYKDEVTNPVVLRAIKEYRKVLNALLKKYGKVHKINIELAREVGKNHSQRAKIEKEQNENYKAKKDAELECEKLGLKINSKNILKLRLFKEQKEFCAYSGEKIKISDLQDEKMLEIDHIYPYSRSFDDSYMNKVLVFTKQNQEKLNQTPFEAFGNDSAKWQKIEVLAKNLPTKKQKRILDKNYKDKEQKNFKDRNLNDTRYIARLVLNYTKDYLDFLPLSDDENTKLNDTQKGSKVHVEAKSGMLTSALRHTWGFSAKDRNNHLHHAIDAVIIAYANNSIVKAFSDFKKEQESNSAELYAKKISELDYKNKRKFFEPFSGFRQKVLDKIDEIFVSKPERKKPSGALHEETFRKEEEFYQSYGGKEGVLKALELGKIRKVNGKIVKNGDMFRVDIFKHKKTNKFYAVPIYTMDFALKVLPNKAVARSKKGEIKDWILMDENYEFCFSLYKDSLILIQTKDMQEPEFVYYNAFTSSTVSLIVSKHDNKFETLSKNQKILFKNANEKEVIAKSIGIQNLKVFEKYIVSALGEVTKAEFRQREDFKK

SEQ ID NO: 84 - protein, 1082 aa, Neisseria meningitidis
MAAFKPNPINYILGLDIGIASVGWAMVEIDEDENPICLIDLGVRVFERAEVPKTGDSLAMARRLARSVRRLTRRRAHRLLRARRLLKREGVLQAADFDENGLIKSLPNTPWQLRAAALDRKLTPLEWSAVLLHLIKHRGYLSQRKNEGETADKELGALLKGVADNAHALQTGDFRTPAELALNKFEKESGHIRNQRGDYSHTFSRKDLQAELILLFEKQKEFGNPHVSGGLKEGIETLLMTQRPALSGDAVQKMLGHCTFEPAEPKAAKNTYTAERFIWLTKLNNLRILEQGSERPLTDTERATLMDEPYRKSKLTYAQARKLLGLEDTAFFKGLRYGKDNAEASTLMEMKAYHAISRALEKEGLKDKKSPLNLSPELQDEIGTAFSLFKTDEDITGRLKDRIQPEILEALLKHISFDKFVQISLKALRRIVPLMEQGKRYDEACAEIYGDHYGKKNTEEKIYLPPIPADEIRNPVVLRALSQARKVINGVVRRYGSPARIHIETAREVGKSFKDRKEIEKRQEENRKDREKAAAKFREYFPNFVGEPKSKDILKLRLYEQQHGKCLYSGKEINLGRLNEKGYVEIDHALPFSRTWDDSFNNKVLVLGSENQNKGNQTPYEYFNGKDNSREWQEFKARVETSRFPRSKKQRILLQKFDEDGFKERNLNDTRYVNRFLCQFVADRMRLTGKGKKRVFASNGQITNLLRGFWGLRKVRAENDRHHALDAVVVACSTVAMQQKITRFVRYKEMNAFDGKTIDKETGEVLHQKTHFPQPWEFFAQEVMIRVFGKPDGKPEFEEADTPEKLRTLLAEKLSSRPEAVHEYVTPLFVSRAPNRKMSGQGHMETVKSAKRLDEGVSVLRVPLTQLKLKDLEKMVNREREPKLYEALKARLEAHKDDPAKAFAEPFYKYDKAGNRTQQVKAVRVEQVQKTGVWVRNHNGIADNATMVRVDVFEKGDKYYLVPIYSWQVAKGILPDRAVVQGKDEEDWQLIDDSFNFKFSLHPNDLVEVITKKARMFGYFASCHRGTGNINIRIHDLDHKIGKNGILEGIGVKTALSFQKYQIDELGKEIRPCRLKKRPPVR

SEQ ID NO: 85 - protein, 1021 aa, Clostridium cellulolyticum
MKYTLGLDVGIASVGWAVIDKDNNKIIDLGVRCFDKAEESKTGESLATARRIARGMRRRISRRSQRLRLVKKLFVQYEIIKDSSEFNRIFDTSRDGWKDPWELRYNALSRILKPYELVQVLTHITKRRGFKSNRKEDLSTTKEGVVITSIKNNSEMLRTKNYRTIGEMIFMETPENSNKRNKVDEYIHTIAREDLLNEIKYIFSIQRKLGSPFVTEKLEHDFLNIWEFQRPFASGDSILSKVGKCTLLKEELRAPTSCYTSEYFGLLQSINNLVLVEDNNTLTLNNDQRAKIIEYAHFKNEIKYSEIRKLLDIEPEILFKAHNLTHKNPSGNNESKKFYEMKSYHKLKSTLPTDIWGKLHSNKESLDNLFYCLTVYKNDNEIKDYLQANNLDYLIEYIAKLPTFNKFKHLSLVAMKRIIPFMEKGYKYSDACNMAELDFTGSSKLEKCNKLTVEPIIENVTNPVVIRALTQARKVINAIIQKYGLPYMVNIELAREAGMTRQDRDNLKKEHENNRKAREKISDLIRQNGRVASGLDILKWRLWEDQGGRCAYSGKPIPVCDLLNDSLTQIDHIYPYSRSMDDSYMNKVLVLTDENQNKRSYTPYEVWGSTEKWEDFEARIYSMHLPQSKEKRLLNRNFITKDLDSFISRNLNDTRYISRFLKNYIESYLQFSNDSPKSCVVCVNGQCTAQLRSRWGLNKNREESDLHHALDAAVIACADRKIIKEITNYYNERENHNYKVKYPLPWHSFRQDLMETLAGVFISRAPRRKITGPAHDETIRSPKHFNKGLTSVKIPLTTVTLEKLETMVKNTKGGISDKAVYNVLKNRLIEHNNKPLKAFAEKIYKPLKNGTNGAIIRSIRVETPSYTGVFRNEGKGISDNSLMVRVDVFKKKDKYYLVPIYVAHMIKKELPSKAIVPLKPESQWELIDSTHEFLFSLYQNDYLVIKTKKGITEGYYRSCHRGTGSLSLMPHFANNKNVKIDIGVRTAISIEKYNVDILGNKSIVKGEPRRGMEKYNSFKSN

SEQ ID NO: 86 - protein, 1131 aa, Acidovorax ebreus
MAQHVFGLDIGIASVGWAILGEQRIIDLGVRCFDKAETAKEGDPLNLTRRQARLLRRRLYRRAWRLTQLSRLLKRKGLIADAKLFAKAPSYGDSAWELRRQGLDRLLTPLEWARVIYHQCKHRGFHWTSKAEEAKADSDAEGGRVKQGLAHTKALMQAKNYRSAAEMVLAEFPDAQRNKRGQYDKALSRVLLGEELALLFATQRRLGNPHASDFFEKLILGDGDRKSGLFWQQKPALSGADLLKMLGKCTFEKGEYRAPKASFSVERHVWLTRLNNLRIVVDGRSRPLNEAERQAALLLPYQTETSKYKTLKNAFIKAGLWGDGVRFGGLAYPSQAQIDAEKTKDPEDQFLVKLPAWHELRKAFKAAGHEALWQQISTPALDGDPTLLDQIATVLSVYKDGAEVVQQLRQLALPEPAASIAVLEKISFDKFSSLSLKALRRIVPLMQSGLRYDEAVAQIPEYGHHSQRIEPGAAKHLYLPPFYEAQRKYAGKGDHIGSMQFRDDADIPRNPVVLRALNQARKVVNALIREYGSPIAVNIEMARDLSRPLDERNKVKRAQEEFRDRNDRARSEFERDFGYKPKAAAFEKWMLYREQLGQCAYSQQPLDIQRVLDDHNYAQVDHALPYSRSYDDSKNNKVLVLTHENQNKGNRTAFEYLTSFPDGEDGERWRTFVAWVQGNKAYRMAKRNRLLRKNYGVDESKGFIDRNLNDTRYICKFFKNYVEEHLQLAARADGDTARRCVVVNGQLTAFLRARWGLTKVRGDSDRHHALDAAVVAACTHGMVKALADYSRRKEISFLQEGFPDPETGEILNPAAFDRARQHFPEPWTHFAHELKARLFTDDLAALREDMQRLGSYTTEDLGRLRTLFVSRAPQRRSGGAVHKETIYAQPESLKQQGGVIEKILLTSLKLQDFDKLLNPESNDHFVEPHRNERLYAAIRQRLEQFGGRADKAFGPDNLFHKPDKNNQPTGPVVRSIKLVRGKQTGIPIRGGLAKNDSMLRVDIFTKAGKFHLVPVYVHHRVTGLPNRAIVAFKDEDEWTLIDESFAFLFSVYPNDYVKVTLKKEQQSGYYSGADRSTGAMNLWAHDRAASVGKDGLIRGIGVKTALSVEKFNVDVLGRIYLAPPETRSGLA

SEQ ID NO: 87 - protein, 1122 aa, Streptococcus suis
MSNGKILGLDIGIASVGVGVIDAQTGEIIHASSRIFPSANAANNAERRTFRGSRRLIRRKKHRIKRLDDLFNDFHINLDGEMSTDNPYVLRVKGLSQKLTVEELYISIKNIMKRRGISYLDDAESDNEAGRSDYAKAIERNRQLLTSKTPGEIQLERLEKYGQLRGNFTIIDEEGQSQQIINVFSTSDYVKEVEKILDCQKMYHKFISDEFCDKLIELLREKRKYYVGPGNEKSRTDYGIYRTDGTTLENLFGILIGKCTFYPDQYRSSRASYTAQEFNFLNDLNNLTVPTETKKLSQEQKEFLVNYAKETSVLGAGKILQQIAKLADCKVEDIRGYRLDNKDKPELHTFETYRAMKGLVPLVDIGVLSREQLDILADILTLNTDFEGIREALKKQLPNVFDEKQVKGLASFRKSKSQLFAKGWHNLSQKIMLEVIPELYATSDEQMTILTRLGKFEKSSVAEYPSSINVDEITDEIYNPVVAKSIRQTIKIINASIKKWGEFDQIVIEMPRDRNEDEEKKRIADGQKANAKEKADSILRAAELYCAGKVLPDYVYNGHNQLATKIRLWYQQGERCIYTGQPISIHDLIHNQNQYEIDHILPLSLTFDDSLSNKVLVLATANQEKAQRTPYNYLKSATSAWSYREFKDYVTKRKGIGKKKCEYLTFEEDINGFEVRSKFIQRNLVDTRYASKVILNALQDYFKISGIQTKVSVVRGQFTSQLRHKWGIEKTRETYHHHAVDALIIAASSQLRLWKKQESPLVVDYQEGRQVDLETGEILELTDEQYKELVYQPPYQGFVNTISSSAFDNEILFSYQVDSKVNRKISDATIYATRNAQLGKDKTEGIYVLGKIKDIYTQAGYEAFLKRYTKDKTSFLMYHKDLDTWEKVIEIILRDYREYDEKGKEIGNPFERYRRENGYVKKYSRKGNGTAIKSLKYYDNKLGNHIDITPENSRNAVVLQSLKPWRTDVYFNKETGKYEFLGIKYSDLSFEKGTGEYGISQEKYDSIKIAEGVAKKSIFKFTLYKQDLLFIKDIENNFGKLLRFTSKNDTSKHYVELKPYDKNKFGTEEPLLPVLGNVAKSGQCIKGLNKSNISIYKVRTDILGYRHFIKQEGEHPQLKFKK

SEQ ID NO: 88 - protein, 1509 aa, Bacteroides coprophilus
MKKTLGLDLGTNSIGWAVINSNIDSEGKEKLVGISSCGSRIIPMDATTLGDFGKGNTKSPVAERTRLRGIRRLLERSLLRRERLHRVLSVMGFLPEHYASQLDRYGKFLPETEPKLAWYKDDSGRYQFLFQKSFHEMLEDFRQHQPELVAGEKKIPYDWTIYYLRKKALSQEITKEELAWILLNFNQKRGYYQLRGEEEQEENNKSVEYHALKVVSVEDSGERKGKDIWYNVTLENGWVYRRASNIPLDWTGKVKEFVVTTELDDAGNPKKDKEGNVKRSFRAPKEDDWGLLKTRTQAQIDESGKTVGTYIYESLLCMPNQKIRGKLVRTIERKYYKDELRQILVKQSEFHAALQDHNLLLSCIEELYPNNEAHRRLLSASSFIYFLIEDILFYQRPLKSQKGLIDNCPYESHIYKDKKDGSLHHVPLKCVSKSHPLFQEFRLWQFLSNLRIYQRERMMDGSLKLDVDVTREFLPSEEDYVKLFDWLNERKEISQKFLLAYKPFGLKKNEQANYRWNYVEDKSYPCNETRAEIKSRLSKAGVPEEFLTEEKEEALWHILYSISDKKELTKALGTFAAKNCLNESFVEVFAKIPPFESNYAAYSLKAIRKLLALMRMGKYWNEQAIDRQTRDRIEKILTGEYDETIRSRVREKAMLLTDISSFRGLPLWLACYIVYDRHSESKELVKWETPADIDHFLSKFKQNSLRNPIVEQVITESLRTVRDIWKQEGKIDEIHVELGREMKNPAKERARITAQVQENENTNLRIKALLAEFMNPEFEIENVHPYSPGQQEILRIYEDGVLSGIAEKDLPDDITAILKKFRENDVKKRPTTSEVLRYKLWLEQRYRSPYTGRVIPLGKLFTPAYEIEHVIPQSRYFDDSISNKVICESAVNKLKDNCLGYEFIKKHSGEMVELGNGETVPVFSVEEYERFVKESYFGNSKKMKKLLLEDIPDSFIERQLNDSRYISRVVTSLLSNLVCEEGEQDGLSKNVIVCTGGITDRLKKDWGVQEVWNRIILPRFLRLNEITGRTDFTSTSVNGHLLPALPLYLQKGFNKKRIDHRHHAMDAIVIACANRNIVNYLNNSSARKNSEISRYDLQRLLCEKVKTDANGNYKWILRKPWETFTQDVYAALTNIVVSFKQNLRVINRTTNYYQHYNEAGEKRMIPQTKGDRWAIRKPMHKDTVYGEVNLRKEKTLPLRDVVKNPSIVVDKSLKNKLYELLKSQYDLKAIAKYFETHQDVWADVNLKKIKVYYFTKETNERFFATRKSLDPSFDQKKIEEEVTDTGVQKILLHHLQQNNNDPDMAFSPDGIDRMNQNMTILNDGKWHQPIYKVRTYEKADKFAVGESGNKAKKFVEAAKGTNLFFAVYESVQEDEAIGKQVCKRTFATIPLNEVIKRKKQGLPAAPEDLNGNLPKFVLSPNDLVYLPTEEERNSSRIIQPLDRERIYKMVSSSGSQCFFIKVFVANSIWDKNEYSSLNKMERAITNEMIKEICVPIKIDRLGNVSLIQI

SEQ ID NO: 89 - protein, 1219 aa, Bacteroides cellulosilyticus
MKEEVRGKNRSQTWAILAKFFVWSEKESVWNEKEARTEERVKEYKLVGLKRDTKGNELKLENYRWRVQALSEQLNPEIVAIVLQEINGQISASSGYLGAISDRSKQLYFNRQTVGQYLMSELEKDPNVSLRNRVFYRQDYLDEFDRIWEKQAEFHEELTVELKKEIRDIIIFYQRRLKSQKGLISFCEFEKREVVVEEDGRKKNKTVGCRVIPRSHPLFQEFKIWQTLNDIEVFAWDKQSKRKKADKSSILFDNSEDALLVEGKRFLYQEEKELLAKELFVKESMKKAEVLKLLFENYQELDLNFKQIDGNHTGFALFSAYSKMIEKYGYEPVDFKRSADEIIEKLETIFTNLGWNTELLSIDLSKEDKELERQSYFRLWHLLYSFEGDNTPTGNGKLLEKIMQLCDVEKEYAVELANVSFQEDYGSLSAKAIKKILPYLKEGNQYDVACDYAGYRHSRSSLTKDEIENKILKDKLEILPKNSLRNPVVEKILNQMVNLINTLIDTYGKPDEIRVELARELKKNAKEREELTKSIARNTREHDEIRQLLRTEFGMMNVSRNDIIRYKLYEELKDNGYKTLYSNEYIPREKIFSKEIDIEHVIPQARLFDDSLSNKTLEYRAINIEKGNKTAYDFVKEKYGNDGLEKFLNRCETLFKDKRTKLRKLKMEEKDIPEGFIDRDLRNTQYISKKAFAMLNEISRRVVATTGSITDKLREDWQLVDLMKELNLPKYEKLGMVEMFEDKDGRKIKKITDWTKRNDHRHHAVDALTVAFTKDVFIQFYNNKNAAWMPASKEHANITGIKARYFENGKALAPMPLAQFRAEAKRHLENLLVSIKAKNKVITSNVNRTKNKNGENRKLQQTPRGQLHLETVYGSHRQYATKIEKVNAAFDVTKIATVSKLAYRNALLKRLEAFGNDPKKAFTGKNTLEKNPLYLDENQTEMVPEKVQTVEFETVYTIRKPIDPNLSIDKVVDVKIRSVLEKRLKEYGGDAKKAFVNLDENPIWLNEAKGISIKRVSIRGISNAQSLHEKKDKDGNLILGKEGRKIPVDFVNTGNNHHVAIYKKPVLDKVGQVVLDEEGNPKYELDEVVVSFFDAVTRANLGQPIIDKDYRRSEGWQFLFSMKQNEYFVFPNDKTGFNPKEVDLLNPENYALISPNLFRVQKFAYKNYVFRHHLETTIKDTSSTLKGITWTDFRSSKGLDKIVKVRVDHIGQIVSIGEY

SEQ ID NO: 90 - protein, 1329 aa, Catenibacterium mitsuokai
IVDYCIGLDLGTGSVGWAVVDMNHRLMKRNGKHLWGSRLFSNAETAANRRASRSIRRRYNKRRERIRLLRAILQDMVLEKDPTFFIRLEHTSFLDEEDKAKYLGTDYKDNYNLFIDEDFNDYTYYHKYPTIYHLRKALCESTEKADPRLIYLALHHIVKYRGNFLYEGQKFNMDASNIEDKLSDIFTQFTSFNNIPYEDDEKKNLEILEILKKPLSKKAKVDEVMTLIAPEKDYKSAFKELVTGIAGNKMNVTKMILCEPIKQGDSEIKLKFSDSNYDDQFSEVEKDLGEYVEFVDALHNVYSWVELQTIMGATHTDNASISEAMVSRYNKHHDDLKLLKDCIKNNVPNKYFDMFRNDSEKSKGYYNYINRPSKAPVDEFYKYVKKCIEKVDTPEAKQILNDIELENFLLKQNSRTNGSVPYQMQLDEMIKIIDNQAEYYPILKEKREQLLSILTFRIPYYFGPLNETSEHAWIKRLEGKENQRILPWNYQDIVDVDATAEGFIKRMRSYCTYFPDEEVLPKNSLIVSKYEVYNELNKIRVDDKLLEVDVKNDIYNELFMKNKTVTEKKLKNWLVNNQCCSKDAEIKGFQKENQFSTSLTPWIDFTNIFGKIDQSNFDLIENIIYDLTVFEDKKIMKRRLKKKYALPDDKVKQILKLKYKDWSRLSKKLLDGIVADNRFGSSVTVLDVLEMSRLNLMEIINDKDLGYAQMIEEATSCPEDGKFTYEEVERLAGSPALKRGIWQSLQIVEEITKVMKCRPKYIYIEFERSEEAKERTESKIKKLENVYKDLDEQTKKEYKSVLEELKGFDNTKKISSDSLFLYFTQLGKCMYSGKKLDIDSLDKYQIDHIVPQSLVKDDSFDNRVLVVPSENQRKLDDLVVPFDIRDKMYRFWKLLFDHELISPKKFYSLIKTEYTERDEERFINRQLVETRQITKNVTQIIEDHYSTTKVAAIRANLSHEFRVKNHIYKNRDINDYHHAHDAYIVALIGGFMRDRYPNMHDSKAVYSEYMKMFRKNKNDQKRWKDGFVINSMNYPYEVDGKLIWNPDLINEIKKCFYYKDCYCTTKLDQKSGQLFNLTVLSNDAHADKGVTKAVVPVNKNRSDVHKYGGFSGLQYTIVAIEGQKKKGKKTELVKKISGVPLHLKAASINEKINYIEEKEGLSDVRIIKDNIPVNQMIEMDGGEYLLTSPTEYVNARQLVLNEKQCALIADIYNAIYKQDYDNLDDILMIQLYIELTNKMKVLYPAYRGIAEKFESMNENYVVISKEEKANIIKQMLIVMHRGPQNGNIVYDDFKISDRIGRLKTKNHNLNNIVFISQSPTGIYTKKYKL

SEQ ID NO: 91 - protein, 1152 aa, Roseburia inulinivorans
MNAEHGKEGLLIMEENFQYRIGLDIGITSVGWAVLQNNSQDEPVRITDLGVRIFDVAENPKNGDALAAPRRDARTTRRRLRRRRHRLERIKFLLQENGLIEMDSFMERYYKGNLPDVYQLRYEGLDRKLKDEELAQVLIHIAKHRGFRSTRKAETKEKEGGAVLKATTENQKIMQEKGYRTVGEMLYLDEAFHTECLWNEKGYVLTPRNRPDDYKHTILRSMLVEEVHAIFAAQRAHGNQKATEGLEEAYVEIMTSQRSFDMGPGLQPDGKPSPYAMEGFGDRVGKCTFEKDEYRAPKATYTAELFVALQKINHTKLIDEFGTGRFFSEEERKTIIGLLLSSKELKYGTIRKKLNIDPSLKFNSLNYSAKKEGETEEERVLDTEKAKFASMFWTYEYSKCLKDRTEEMPVGEKADLFDRIGEILTAYKNDDSRSSRLKELGLSGEEIDGLLDLSPAKYQRVSLKAMRKMQPYLEDGLIYDKACEAAGYDFRALNDGNKKHLLKGEEINAIVNDITNPVVKRSVSQTIKVINAIIQKYGSPQAVNIELAREMSKNFQDRTNLEKEMKKRQQENERAKQQIIELGKQNPTGQDILKYRLWNDQGGYCLYSGKKIPLEELFDGGYDIDHILPYSITFDDSYRNKVLVTAQENRQKGNRTPYEYFGADEKRWEDYEASVRLLVRDYKKQQKLLKKNFTEEERKEFKERNLNDTKYITRVVYNMIRQNLELEPFNHPEKKKQVWAVNGAVTSYLRKRWGLMQKDRSTDRHHAMDAVVIACCTDGMIHKISRYMQGRELAYSRNFKFPDEETGEILNRDNFTREQWDEKFGVKVPLPWNSFRDELDIRLLNEDPKNFLLTHADVQRELDYPGWMYGEEESPIEEGRYINYIRPLFVSRMPNHKVTGSAHDATIRSARDYETRGVVITKVPLTDLKLNKDNEIEGYYDKDSDRLLYQALVRQLLLHGNDGKKAFAEDFHKPKADGTEGPVVRKVKIEKKQTSGVMVRGGTGIAANGEMVRIDVFRENGKYYFVPVYTADVVRKVLPNRAATHTKPYSEWRVMDDANFVFSLYSRDLIHVKSKKDIKTNLVNGGLLLQKEIFAYYTGADIATASIAGFANDSNFKFRGLGIQSLEIFEKCQVDILGNISVVRHENRQEFH

SEQ ID NO: 92 - protein, 686 aa, Coprococcus comes
MKKQDSPKNNMGYTAYNLNVLGYEEFAKRVELLFKDTDAVKRLNDSHMQMAEGFDLNALPGSPALRRGVSQAIKVLDDIVSVAGKAPDRIYLKVTRTASNSRKGKRTAKRSDKIKQALKALDADAAADLGAAKLLRELGMFDEKEINERIYLYFHQAGKCLYTGKPIDITRIASNDYYVDHVVPLAYRKDESLDNKVLVYAEASRYKSETLLVSPAVQRKMLPFWRMLRNAGLMSERKLNALIRTEISEGMLKSIIGRQFTENSWEAKLFTAAIAAKYPGTVVIPVKAGVIGAVRSRIGIPKSLKANQFYHAHDALLAAEVGRYMELAKPAFVHNRVKYEQYMRKIKLVNEENKKAPKSQLDFFAGGFFFDRVDKDTGEVYWNKDEEVERIYRACGWKNLRVTYAAFEDGGAFWKQTIYSPREKSKLIATKSDRPAEIYGGYSSQTFANFFVYEVMKKKVKQLRFGAVPAAIASKSDPDTYNAMLEMYARGLAKTAKEKFVRIVRARVLKNTMIELYGERFRIAGEKQVYPVRQMPLAIDEVYLLKGVETIAAAGNAGASAKIDFEKAAESLVGFWDLLLEKLPVNYPKLTVQLKLGLLKHPKDILAATSESEFPAIVYKIAEAEIQVMEQASGLRNMSDTKILGGNTFGGSLVFTFNKVLNDPKSKACFIDTTPAGLYEVKTKIW

SEQ ID NO: 93 - protein, 1105 aa, Actinomyces coleocanis
MDNKNYRIGIDVGLNSIGFCAVEVDQHDTPLGFLNLSVYRHDAGIDPNGKKTNTTRLAMSGVARRTRRLFRKRKRRLAALDRFIEAQGWTLPDHADYKDPYTPWLVRAELAQTPIRDENDLHEKLAIAVRHIARHRGWRSPWVPVRSLHVEQPPSDQYLALKERVEAKTLLQMPEGATPAEMVVALDLSVDVNLRPKNREKTDTRPENKKPGFLGGKLMQSDNANELRKIAKIQGLDDALLRELIELVFAADSPKGASGELVGYDVLPGQHGKRRAEKAHPAFQRYRIASIVSNLRIRHLGSGADERLDVETQKRVFEYLLNAKPTADITWSDVAEEIGVERNLLMGTATQTADGERASAKPPVDVTNVAFATCKIKPLKEWWLNADYEARCVMVSALSHAEKLTEGTAAEVEVAEFLQNLSDEDNEKLDSFSLPIGRAAYSVDSLERLTKRMIENGEDLFEARVNEFGVSEDWRPPAEPIGARVGNPAVDRVLKAVNRYLMAAEAEWGAPLSVNIEHVREGFISKRQAVEIDRENQKRYQRNQAVRSQIADHINATSGVRGSDVTRYLAIQRQNGECLYCGTAITFVNSEMDHIVPRAGLGSTNTRDNLVATCERCNKSKSNKPFAVWAAECGIPGVSVAEALKRVDFWIADGFASSKEHRELQKGVKDRLKRKVSDPEIDNRSMESVAWMARELAHRVQYYFDEKHTGTKVRVFRGSLTSAARKASGFESRVNFIGGNGKTRLDRRHHAMDAATVAMLRNSVAKTLVLRGNIRASERAIGAAETWKSFRGENVADRQIFESWSENMRVLVEKFNLALYNDEVSIFSSLRLQLGNGKAHDDTITKLQMHKVGDAWSLTEIDRASTPALWCALTRQPDFTWKDGLPANEDRTIIVNGTHYGPLDKVGIFGKAAASLLVRGGSVDIGSAIHHARIYRIAGKKPTYGMVRVFAPDLLRYRNEDLFNVELPPQSVSMRYAEPKVREAIREGKAEYLGWLVVGDELLLDLSSETSGQIAELQQDFPGTTHWTVAGFFSPSRLRLRPVYLAQEGLGEDVSEGSKSIIAGQGWRPAVNKVFGSAMPEVIRRDGLGRKRRFSYSGLPVSWQG

SEQ ID NO: 94 - protein, 1361 aa, Anaerococcus tetradius
MGNYYLGLDIGTNSVGWAVTDENYNIERFKKKNMWGIRLFDEAKTAESRRIHRQARRMRQRKIQRLNLLMELFDVEISKVDESFFIRKKESDLHYEDKSQDSRYALFNDKEFNDKDYHNKYPTIFHLIMDLIENDEKKDIRLLYLACHYLIKNRGHFIFEGQKFDVNSSLNNNINKLKSHLDQFYNICLDFDNDKLIEILVNQNLNISEKSKKIKELLRKTNLEVGIANLIAGGSIKLSNMFDDDELKNLDYNSLSFKNSNFDEGRELFEEVLEDRFELVEILKDIHDASVLETMLSSASISPDGGKYISSSMINSYNKHKRDLKLLKKIIKKYKKSEYDNIFRDENIKNNYLSYTRTGINKNKKVQAEDNTDSDGFYKYIVKILKDIKENDSDEDIKYILSEIDKKNFVPKQRTKENSVIPYQLREIELRKIIDNQSKYHKFLNEVDEKGISVKEKIISLLTFRIPYYIGPLNPSYNEEKNFTTSWVKRLAKGKVTPWNFEDMVDIDASREAFIENKLNKCSFLLDETVLPKDSLLYQEYMVLNELNNLKINGQSINTDLKKSIYEELFKKYKKVTRKRLISYIKEKENMSGDIVITGIDGDFKQGLKSYIAFKDIIGEKIDDDIYRKEVEKIIRDISLYGDDKSFIQKKIKNENKLDLSDDQISKIAKLKFKDWGRFSKKLLVGIKASDKNTGEIDNIIGFMRNYNYNIMQLMANVFTFKDEIEKLNSKYYTDEKINIDYLDDLYLSSPAKRMLWQSFQIVDEIKNIKNSDPKKIFIEMARSKEDKPTRKMSRKSRLEKLYTDSKKQFIKLFGPDEYDKLNNEIKNKSESDFRWDNLYLYYTQFGRCMYSLDPIDLEELSNKNLYDQDHIYPKSKIYDDSIENRVLVKKQLNLDKSNEYPIPDRVLNKDKNKLLAFWKMLNEKELIGDKKYARLIRKSPFTDEELGDFIARQLVETRQATKETANMLKRLCPDSKIVYVKAKNVSDFRRKFDILKCRSINDLHHAHDAYLNIVVGNVFDTKFTSNPLNFIKNNSKNRSYNLEKIYDYDVIRNEKIAWLAERKEENQDGSIATVLKNLSKNDIRVTRRTYIKCEDLFDENIVRKGNGKFPIKENNNKSDTNKYGGYSGIKNAYFVLLEDEKHNRILEAIPSFIYKKEKNGEKGSVINYLQNILGIKSAKILRDKIKIGSLLKIDKFPYNLAGKSGNGILISGGVQLILDKNTSKYIKKIENYKYKLDENKDYQINIFDKLSKEENIKLFDLFVDKFENSIYKNRVNIKLKEIKLARPKFEHLSIEEQIKTLTQMLILFGRENNAVNLEYIGLPKNTGKTKINKKINNKDIKIINQSITGLYETEEDLANI

SEQ ID NO: 95 - protein, 1377 aa, Lactobacillus brevis
MESNHDGEQVKYTLGLDIGTSSIGYAAIDKHQKPIRAKGKHVIGVRLFQEGQTAADRRAFRTTRRRLKRRKWRLNLLNRLFDPYLSEVDPNFLPRLRQSNLSPKDDNKHFNGSTLFPDKTDAAFYRQYPTMYHLRYALMTEKRKFDIREVYLAIHHIVKYRGNFLNSATVDSFKTSNIDFTSQFDRLNELYRQVILDEPFQINMDQVDEMTNKLLDNDALKLDTQKQVAKLLPVIYNDKPIDKQYTRIATEFSKAILGYKTKLDVILNLDTQNAKDWVIRLDDEDIDDKLPALVENLDESRQEIVTIIRDLYAQITLNAIVPKGKSLSESMVDKYNDHKDHLDLLMGLIHELGDDSAKGIKLREAYTQYVGKSDDKTLNQDDFYAAIKKNLDEDSKRSPKIQRLIEQASFMPKQRTSANGVIPHQLHQLELDRIIENQGRYYPFLKKPNPNTHKPNGGKYKLDELVAFRIPYYVGPLITKRDQEKTSGADFAWMIRKPGQEGEITPWNFDQKVDRMASANRFIRRMTTKDSYLVAEDVLPDASLIYEKFKALNELNMLKVNDSRLSPSQKQDLFNNLFKKQKTIRTKKLQTYIRTNWELPSVMISGLADPDKFNSSLSTYIDFRDIFGEKVDDPNRQADYEEIIEWSTVFEDRKIYQAKLNQLDWLTEPQRKALLTKRYTGWGRLSKKLLTGLKDQNGDSILDQLWKTNDNFMQIQSRDEFAKQIHDENAKQFHEANNVDDILDDAFTSPQNKKAIRQVDKVVQDVVKAVGYAPDKIAIEFTRSLENNPQRTVSRQRQLQAAYKNIPREIMKSGLMAELGSVADSKKVLSDKLYLYFTQMGKDMYEDKTINIDNLPNYDIDHILPQAFIKDDSIDNRVLISKEENARKSNRVPLKFFGAKRMGFWKDLLNNGLISNRKFQNLTTDPEKISKYSAKGFIHRQLVETSQVIRLVANILGNEYSQAGTTIIEVSAKMNRQLREDFHLIKNRNVNDYHHAMDAYLTAYVGDYLYLRYPKLRPYFVYGDFKKAEDQDLNIRNFNFLHDLKDNESLDKIVDSETGEIVWEKHGSVKQLKKVYHYKFMLVSQEVYTRQDALFNQTIYPASDADKRKLIPIKNSKPVDVYGGYSGNIDAYMAIVRVHGKKEDNYKVVGIPMRAVTKLKKAEKEGHDSYLNAVHEVLKPQFTKKKKNRKTGEITETVDEFDVLLGKVYYRQLIVDGNKKFMLGSSSYQYNAKQLVLSDKAMQVLSKNGKVKSQDENQNLIDVYDEILEKVDQYFELYDQRHYRESLHKGRGIFVNLPLSNQYDGSKLTSYGKYETIDAILNGLHANATMSNLRYLGISSPFGKMQASNGLTIDPDSIICYQSPTGLFERQIKLSDL

SEQ ID NO: 96 - protein, 1239 aa, Lactobacillus buchneri
MTEKRKFDIREVYLAIHHIVKYRGNFLNSATVDSFKTSNIDFTSQFDRLNELYRQVILEEPFQINMNQVDKMTNKLLDNDALKLDTQKQVAKLLPVIYNDKPVDKQYTRLATEFSKAILGYKTKLDVILNLDTQNAKDWAIRLDDEDIDDKLPALVENLDESRQEIVTIIRDLYAQITLNAIVPKGKSLSESMVDKYNDHKDHLDLLMGLIHELGDDSAKGIKLREAYTQYVGKSGDKTLNQDDFYAAIKKNLDEDSKRSPKIQRLIEQASFMPKQRTSANGVIPHQLHQLELDRIIENQGRYYPFLKEPNSNTHKPNGGKYKLDELVAFRIPYYVGPLITKQDQEKTSGADFAWMIRKPGQGGEITPWNFDQEVDRMASANTFIRRMTTKDSYLVAEDVLPDSSLIYEKFKVLNELNMLKVNDRRLSISQKQDLFNNLFKKQKTIRTKKLQTYIRTKWELPSVMISGLSDPDKFNSSLATYIDFRDVFGEKVDDPNRQADYEKIIEWSTVFEDRKIYQAKLNQLDWLTESQSKALLTKHYTGWGRLSKKLLTGLKDQNGDSILDQLWKTNDNFMQIQSRDEFAKQIHDENAKQFHEANNVDDILDDAFTSPQNKKAIRQVDKVVQDVVKAVGYAPDKIAIEFTRSPQDRPQRTFSRQRQLQSTYLNVAKALMKSNLNQELKSVIDSQQTLTDKLYLYFTQLGQDMYTGKEINFDELVNYQIDHILPQAFIKDDSLDNRVLVSAPINNAKSDNVPVKKFGAKMGYFWKQLAENHLISKRKLNNLTTDPDKIGKFTAQGFIHRQLVETSQVIRLVANILGNEYGHDGTTIIEVTAKMNHQMRKDFDLIKIRDVNDYHHAMDAYLTAYVGDYLYLRYPKLRSYFVYGDFKKLKDQSLKIRNFNFLHDLTNDEAGDKIVDQETGEIIWDKHESVKQLKKVYHYKFMLVSQEVYTRQDALFNQTIYPASDADKRKLIPIKNNKPVDVYGGYSGNVDAYMAIVRIHGKKEDKYKVVGVPMRAVADLKKAESKGRDNYLNAVHEVLKPQFTKKKKDRKTGEITEMMDDFDVLLGKVYYRQLIVDGNKKFMLGSSTYQYNAKQLVLSDKAMQVLSKDDKLKNQDENQNLIDVYDEILEKVDQYFELYDINKFRQKLHDGRKKFIELPVDNDFNGKKLISYGKRATIISILNGLHANATMSNLKYLGISSPFGMLQVPNGIILSPASRICYQSPTGLFERKVKLSDL

SEQ ID NO: 97 - protein, 1381 aa, Lactobacillus fermentum
MDYVKEYHIGLDIGTSSIGWAVTDSQFKLMRIKGKTAIGVRLFEEGKTAAERRTFRTTRRRLKRRKWRLHYLDKIFAPHLQEVDENFLRRLKQSNIHPEDPAKNQAFIGKLLFPDLLKKNERGYPTLIKMRDELPVEQRAHYPVTNIYKLREAMINEDRQFDLREVYLAVHHIVKYRGHFLNNASVDKFKVGRIDFDKSFNVLNEAYEELQNGEGSFTIEPSKVEKIGQLLLDTKMRKLDRQKAVAKLLEVKVADKEETKRNKQIATAMSKLVLGYKADFATVAMANGNEWKIDLSSETSEDEIEKFREELSDAQNDILTEITSLFSQIMLNAIVPNGMSISESMMDRYWTHERQLAEVKEYLATQPASARKEFDQVYNKYIGQVPKEKGFDLEKGLKKILSKKENWKEIDELLKAGDFLPKQRTSANGVIPHQMHQQELDRIIEKQAKYYPWLATENPATGERDRHQAKYELDQLVSFRIPYYVGPLVTPEVQKATSGAKFAWAKRKEDGEITPWNLWDKIDRAESAEAFIKRMTVKDTYLLNEDVLPANSLLYQKYNVLNELNNVRVNGRRLSVGIKQDIYTELFKKKKTVKAGDVASLVMAKTRGVNKPSVEGLSDPKKFNSNLATYLDLKSIMGDKVDDNRYQMDLENIIEWRSVFEDGEIFADKLTEVEWLTDEQRSALVKKRYKGWGRLSKKLLTGIVDENGQRIIDLMWNTDQNFMQIVNQPVFKEQIDQLNQKAITNDGMTLRERVESVLDDAYTSPQNKKAIWQVVRVVEDIVKAVGNAPKSISIEFARNEGNKGEITRSRRTQLQKLFEDQAHELVKDTSLTEELEKAPDLSDRYYFYFTQGGKDMYTGDPINFDEISTKYDIDHILPQSFVKDDSLDNRVLVSRAENNKKSDRVPAKLYAAKMKPYWNQLLKQGLITQRKFENLTMDVDQNIKYRSLGFVKRQLVETRQVIKLTANILGSMYQEAGTDIIETRAGLTKQLREEFDLPKVREVNDYHHAVDAYLTTFAGQYLNRRYPKLRSFFVYGEYMKFKHGSDLKLRNFNFFHELMEGDKSQGKVVDQQTGELITTRDEVAKSFDRLLNMKYMLVSKEVHDRSDQLYGATIVTAKESGKLTSPIEIKKNRPVDLYGAYTNGTSAFMTIIKFTGNKPKYKVIGVPTTSAVGLKRVGKPGSESYNQELHRIIKSNPKVKKDFEIVVPHVSYSQLIVDGDCKFTLASDTYQHPATQLVLSKESMEIIADDFKFVKENPATADEQLVRVFDEIVNQMNHYFTIFDQRSNRQKVTKARDKFVSLPTESEYEGAKKTQVGKTEVITNLLMGLHANAAQGDLKVLGLSTFGFFQSSGGLNLSEDAMIVYQSPTGLFERRICLKDI

SEQ ID NO: 98 - protein, 1306 aa, Sphingobacterium spiritivorum
MKHILGLDLGTNSIGWALIKQNFENKQGEILGMGSRIIPMGAELSKFEQGQAQTKNANRRIARGTRKLNKRYKQRRNKLIYILQGLGMLPDQIKLVNQFSDPNKLDKISILPISKNQQQLTAFDLLELRVKALTEKIELEELGKVIYKYNQLRGYSGGNSEPEKEENNEDESEENEKTNDSFVVFSKVLSLGLPEEITFKGKKLSKRKIAIETEDGIIEAETFLDSLKENDSLELHVNIRRAKSGDTITIKLPSKTSWRKKMENIEKQLADKSKELGREYFISELLFDILKENKWAKIRNNVILRSRYESEFDAVWSEQSKYYPILNHLETDRLQKILEFIFPGQKESQEKLRQTGLKEGLKYVIKNQVVFYQRELKDQSDLISNCRYEPTEKVVAKSHPVFQEYKIWEQINKLVINTKIENGVNRKGEIRYKYIDKPIPVALKEWLYEELQSKKEVSFNPILTKLKKEFKLRENVDFLNGMNAKDKLKGNETKVILQKALGELWNIFGLDDSERQVELWEILYNGKGNEYDLTSERTSNILAFIEKYSPDLENKNDVAIKISKIKFSRNYSNLSLKAIDNILPLVRAGKFFDQNFSEALSHKIVKLLNENVEDPFEKSAQEFLDKNQDVLSDGGIVNAIATILVYDKHTAKEYSGDELIKEFTQISRLKQGELRNPLAEQIINEALVIVRDIWRKYGFKPDEIRVELARELKNNAVERGKMYSANLKSQKHNAEIRNKLIELKQEISIANIEKYKLWVSQENLQEVYLKNYNDPSKSEIEKLKLWESQGHISPYTGQPISLSELFNRERYDVDHIIPQSRYFDDSLSNKVICEKSINNEKGNRTSMEYFEVGSVNYRIFTKDQFIDHANKYFSGKKRKNLLATSIPEDPIQRQIKDTQYISIRIREELNKIVGNENVKTTTGGITDYLRNHWGLTDKFKVLLKERYEAVLPKIAQLEYDNYKKETEKKFTEYKNADVEFNEPILDEEIFIEKFRSEFIRKKNNKLIIKGWSKRIDHRHHAMDALVIACTQPAHIKRLNDLNQVLKEWLDKNKEKFFPGFSGTKTELLDEVLNLEEEKRREIFNQLEKFRAIEMPWKGFPEEAEQKLKEVIVSHKPKDKLLLQYDIQGNKQIKLRGQLHEGTLYGLSNGKEIYRIPINKLAGKQFATEKTIEKIVNPFLKNVIEEHLKSFGKKEEAFSAEGILDLNKKLAERKDEQQNPKPHPPISTIKIYYKDPSKSKKKKTDDEDDISLQKLNRKKSFNDSLYVKTGDNYLFAVMEKEVFNKKLNKDKTERHYDLKLFLTLLIF

SEQ ID NO: 99 - protein, 1358 aa, Acidaminococcus sp.
MGKMYYLGLDIGTNSVGYAVTDPSYHLLKFKGEPMWGAHVFAAGNQSAERRSFRTSRRRLDRRQQRVKLVQEIFAPVISPIDPRFFIRLHESALWRDDVAETDKHIFFNDPTYTDKEYYSDYPTIHHLIVDLMESSEKHDPRLVYLAVAWLVAHRGHFLNEVDKDNIGDVLSFDAFYPEFLAFLSDNGVSPWVCESKALQATLLSRNSVNDKYKALKSLIFGSQKPEDNFDANISEDGLIQLLAGKKVKVNKLFPQESNDASFTLNDKEDAIEEILGTLTPDECEWIAHIRRLFDWAIMKHALKDGRTISESKVKLYEQHHHDLTQLKYFVKTYLAKEYDDIFRNVDSETTKNYVAYSYHVKEVKGTLPKNKATQEEFCKYVLGKVKNIECSEADKVDFDEMIQRLTDNSFMPKQVSGENRVIPYQLYYYELKTILNKAASYLPFLTQCGKDAISNQDKLLSIMTFRIPYFVGPLRKDNSEHAWLERKAGKIYPWNFNDKVDLDKSEEAFIRRMTNTCTYYPGEDVLPLDSLIYEKFMILNEINNIRIDGYPISVDVKQQVFGLFEKKRRVTVKDIQNLLLSLGALDKHGKLTGIDTTIHSNYNTYHHFKSLMERGVLTRDDVERIVERMTYSDDTKRVRLWLNNNYGTLTADDVKHISRLRKHDFGRLSKMFLTGLKGVHKETGERASILDFMWNTNDNLMQLLSECYTFSDEITKLQEAYYAKAQLSLNDFLDSMYISNAVKRPIYRTLAVVNDIRKACGTAPKRIFIEMARDGESKKKRSVTRREQIKNLYRSIRKDFQQEVDFLEKILENKSDGQLQSDALYLYFAQLGRDMYTGDPIKLEHIKDQSFYNIDHIYPQSMVKDDSLDNKVLVQSEINGEKSSRYPLDAAIRNKMKPLWDAYYNHGLISLKKYQRLTRSTPFTDDEKWDFINRQLVETRQSTKALAILLKRKFPDTEIVYSKAGLSSDFRHEFGLVKSRNINDLHHAKDAFLAIVTGNVYHERFNRRWFMVNQPYSVKTKTLFTHSIKNGNFVAWNGEEDLGRIVKMLKQNKNTIHFTRFSFDRKEGLFDIQPLKASTGLVPRKAGLDVVKYGGYDKSTAAYYLLVRFTLEDKKTQHKLMMIPVEGLYKARIDHDKEFLTDYAQTTISEILQKDKQKVINIMFPMGTRHIKLNSMISIDGFYLSIGGKSSKGKSVLCHAMVPLIVPHKIECYIKAMESFARKFKENNKLRIVEKFDKITVEDNLNLYELFLQKLQHNPYNKFFSTQFDVLTNGRSTFTKLSPEEQVQTLLNILSIFKTCRSSGCDLKSINGSAQAARIMISADLTGLSKKYSDIRLVEQSASGLFVSKSQNLLEYL

SEQ ID NO: 100 - protein, 653 aa, Oribacterium sinus
MELINSEEFTFKEELEKHTQVAMKQLSEFTYEDLEDSYFSVPVKRMIWQTLLVVREIEKVMGYAPKRIFVEMTRTEEEKGDKGRKESRGNQLLELYKSIKNTDSHNWKEEIAAADKDGKLRSKKLFLYYMQMGRDMYTGEEIDLGRLYDDNLYDIDHIYPRHYVKDDSIMNNLVLVNRRANQDIKKDLYPIPEQIKANPNVHMLWDALHKQKLITDEKYARLTSNTAFSEKQLGDFIARQLVETGQGTKGVADLLEQLFKDTVIVYAKASNVSDFRRDNGFLKSRLVNDFHHAQDAYLNIVVGNVYYTKFTKNPWNFICKDYEKDKEKNRYNLARMFDWNVVRGSETAWIVERKDEKGTISTVRKMMQKNTPLLTRMNFEQHGSIANATLYSAKKAKSENYLPLKTADEKMSDVKKYGGYTSMSIAYYFIVHHKEDKKENVTIEALPLYCKDKVEREENGLEKYCEEVLGYGEVNIIRRKLKIQSLLEFNGYQVHLSGKTGNQLILRNAISLCLSTKWITYIKKLEKAVNIQIVEEVVTPEENIKLYNLLADKHANTVYSKRPNAYGEKLLADREIFVTLEFGKQCEALLQILSLTKIGSTEANLLLIGESEHSGKILISKNLKASDRPAVINQSPCGLYEKKEWIFDKIVEK

SEQ ID NO: 101 - protein, 1436 aa, Capnocytophaga gingivalis
MKYIKYILGLDIGSNSIGWALIQLDLLQKTKRIIAAGSRIIPMDQKVLSDFGKGITISPTAQRTSYRNARHCRERHLLRRERLHRVLHILGFLPTHYDKQIDFSKRYGKFVDNTEPKIAYNEGKFLFMDSFQEMLSDFKSHQPDLFYTKKNGEESKIPYDWTIYYLRKKALSQKISKEELAWIILNFNQKRGYYQLREEEGNKENDFEIISSKIISVIKKDKDKKYNKYWYDIILENGLVYQAAFYNDFVYNWINQDREFIIERTSLKNGAEKVKLSYLPTFDEIDKMDKKEQDKYYKKIKIKTENSIGNKTVGCYIYDHILQNPNEKIKGKLVRTIERKYYKEELKAILEKQIALQPELFTDQLLADCIRELYSKNEAQQRNLAARDFVHLLVEDIIFYQRPLRRQKSTLANCSLESRSYIDKDSHTRKEAPLKVCPKSNPYYQEFRVLQWLQNLKIYEIDSDQEVTHQFIKTLEDKQQLFEFLMAQKEIDCEELLKYFLNQTYPNAKEKALKSELKKWKDTYRWNYVYDIGEKSSKKYPMNETRYELKRHLEKVANLPDDFLSSEVEYLLWHLIYSVKDKVAYEKGLKKFAQKHHLDKDSFVESFKKFNPYPSEYGSFSEKAIRKLLPLMRFGAHWDFNHIDKNTQKRIEDLITGVENEEIRTILREKAEKYQLEKETDFQDLPLWLAQYIVYNRHAEASSLEKWTSVNDLETYLNEFKQHSLRNPIVEQVVMETLRVVRDIWQQYGQGQASFFNEIHIELGRELKKTAKEREKLSKQNQKNEDINLSIKEKLKELEKYNTRAYSITHQEKYKLWLEQKHISPYTGQIISPENLFTDNYEIEHIIPQSRFFDDSLSNKVVCESIVNKAPYKDRQLGLEFIKNQGGRIVKELSKENKTIKIFTEEQYRTFIKEHYSNNPEKTKKLLLEEIPEKMVARQMNDTCYISKFISEILSKIVRSDEQDEGVHSKNVILCTGKITSILRQDWGLNDIWDNLILPRFERMNNLLQKEKFTIYSIEKQKKIPVVPINDQFKSFQKKRIDHRHHAMDAIIIACTTREHINYINNQHALEKEKDKKEKQEERDKLREKLCIKKYNNRSEGNYSWIFKKPWDTFTQEVRVALEDIVVSFKQNLRVINKATNYYERWVEENGKYIKKMVKQEGTNWAIRKPLHEETISGKIYLDREKITKNDILTATRKTVDSSFDDKRIKKITDTGIQKILLNYLKYKGSPEIAFSPEGLEELNKNLSIYNDGKPHKPIYKVRIYEKGSGRFALGEKGRKYKKYVQGASNLYFGIYQGAKRSFATIPLNEVIERQKQGLPSVPEYNEKGDLLLFSLSPNDLVYVPIEGEIIENIDFRNLSKEQKERIYNVNDFSSTCYFTPNRIAKAIFPKEVDLQRKGDKLSGSYDTKTASLEGIQIKEVCIKLKVDRLGNISKA

SEQ ID NO: 102 - protein, 1069 aa, Bacillus cereus
MNYDIGLRIGITSCGWSIINKDLERIEDLGVRVFEKAENPDGTASAAPRREARKSRRKHRRKKHRIERIKRLIVQHDLLSKKELDSLYLSPFNIDVWNLQVEALERKLDNREFARVLIHLVQRRGFQTIRKSVEIQEEGKLLENVSENERIMKVNGYKTVGEMFSKHEKFTHHKRNKDGSYTSVVTRSLLLKEIKTIFNSQRILGNVFSTQKLESDYLYIWGSQRPTLTYEQLMSMVGNCIYEKKEKRAPKTSWAFQYFSLLQKINKLKVSDDNTLRKLSKEERDIVIELAFKKKNVSFVDIRKALKLNDNTKFNHLTYSHVVETKKVEKATFIELKGYHLIKKQLKDRNVELTQELQPKDYDAIAAASTFFKNDIEFRDYLRNQYLDSNGKRKSNIANKVFEDKVIAAVFELNFSKVCHLSFKSLYKLIPHLEKGLDYKEAILCAGYNFRDENKRDKKLFLPVIQQETNPVVHRALTQARKVINAIIREYGSPNTIRFVVANDLAKTYKQRKELESTLKKNRAENEKIKTKLLSMGIINPTGMDIVKYKLWYEQSGICLYTGRQMELSSLFKPGYSIVNHIIPYNRSFDDTYHNRVLTLTETKYEKGNKIPFEYFGAEETCWNEYEKRVSTSKKIHDKKREKLLIRNFDIEYENEMISNNVFDTHYIGSYFEKYIDEHLQFKKSTKKQKVFSIHGNMVAHLHSRWGFNKNSREIYLNHAVDAAIVAVLTDQLIRNIADYYRRDNILEQKGSLKFPEPWKSFSIELEARISPQVRDLIKKLNLDSYLDVDILHIKPVFISKKPRRKVNGEAHKSTIRSLIGINEIGKTVTCIKTRLEDIPFDENGDFPMYGKDTDKYTYTAIKERYLEFNKDKEKAFSTPLYKLKRNGEPGNQIKSVKIIDTRNIVNKVNQGKGIAYNSNIIRVDVFSRDQKYYVVPIYLRDFIKGSLPNKIITAAKGFMQWPETDNSYTFLFSIFPNDLIKVVPKEGKFIKAKNENKENINLTEILGYFKGLDSSTGAFTLESHDGSLLARGIGTKNLLLIEKYQVDVLGRYNKVGNEERQDIKIQQN

SEQ ID NO: 103 - protein, 1391 aa, Lactobacillus jensenii
MKEIKDYIIGLDIGTNSCGYVVTDKQNNILKLKGKTAIGARLFKEGEAAADRRAFRTTRRRLARRRWRLSLLEEIFDEEMNKVDPSFFRRLKESDYSPKDRRKQFNSIVFESSEADKAFYEKYPTIYHLRNALMHDNQKHDLREIFLAVHHIVKYRGNFLREDSVKAFKAAKFTLQGEDGIGPVDKLNDLLKEIYIEAAPELATDNLSKIEDIIKDKKLYKQDKLKQIANLLPKAVDSKDKAKLNKDIAKQVANALMGYMFRLDTLFSFTDVDVKDYKLKFSDANIDESLDALTSLLTDAQIEFVLELQSIYNTIVLNEIVPDGMSLSESMVKKYDDHKKDLKLYKEYIDSLSDQKKAKQLEAAYALYVNYRKADLLAAKKLFEKKKIGDKKFVDVISNFEVFGKFVSDNLDDSELANKIKARLDLGEFLPKQRTNQNGVIPYQLHQVELTQILEKQGKYYPFLITPNPVESHRNNAPYEISELVSFRVPYYVGPLIDNQSIKDKQNKNKFAWMVRQKQGQITPWNFEEMVDTTESANQFIKRMTRKDTYLLAEDVLPKSSLIYQKFMILDELNRIKIDGKKLTSKLKHDIFEKLFKKQKSINLDNLKNYLLAEGNIPGLIEGLSDGINFNNSFSTYIDYRNIFGDEIDNPNKQADFEKMIEWSTVFEDRKIFKRKLKEITWLTPEQIKQVSSKRYSGWGRLSKKLLTQITDENGVNILQRLWNEPETLTEVLANPVIKRKISEANSLFVQINKVENILDDAYTSPQNKKAIRQVIRVVDDIIAAAHGKKPSQIAIEFARSSQNKAKVPDTRKKQLDKIYNKISSEILDSSIKNELKNLKSNKYLSKDKLFLYFKQMGRDAYTGDKLSLDQLQNYDIDHIFPRSFIKDDSLDNRVLTQKPINAKKSDYGIPALEFGNKYVPDLGITVKEMWKLWQENGLISKSKLINLCTNPKKIGSKRASGFINRQLVETSQVIKLVAIILQAEFPDTEIIEVKALQNTTLRESFHLYKNRSVNDYHHAIDAYLTTIVGNYLYQVYPKLRPYFVYGQFKKFNQEKNIDILKRLKNFNFLRQLIFNTDDNIYISGTKEIVFNKKDIIHKLETAYGYKYMNISRECYQETSSLFNQTLYAHNSSVKNSLIPKKKGLPTEIYGGYSGNKDSFFVLVKIVKKRTNLYRIVGIPTRELAKLNSSNNYNQALNKIVESKLCLKETESFKILIKRLLYGTLIVDNGQKFRIGSFKEKHNVQQLVLQLKSMKYIKFYIDGGQNYFTDVERKKLEKQDRDKCLLYVFDDIMNVVNKRFTLFDMSKYEKDGDSLREKFNCLDFNDKVSILSDLLKAFHANSDRTSITKLKITNLGRHQAGKNGITLTTNAQIIYQSPTGLFERRIKIKDL

SEQ ID NO: 104 - protein, 1114 aa, Eubacterium rectale
MNYTEKEKLFMKYILALDIGIASVGWAILDKESETVIEAGSNIFPEASAADNQLRRDMRGAKRNNRRLKTRINDFIKLWENNNLSIPQFKSTEIVGLKVRAITEEITLDELYLILYSYLKHRGISYLEDALDDTVSGSSAYANGLKLNAKELETHYPCEIQQERLNTIGKYRGQSQIINENGEVLDLSNVFTIGAYRKEIQRVFEIQKKYHPELTDEFCDGYMLIFNRKRKYYEGPGNEKSRTDYGRFTTKLDANGNYITEDNIFEKLIGKCSVYPDELRAAAASYTAQEYNVLNDLNNLTINGRKLEENEKHEIVERIKSSNTINMRKIISDCMGENIDDFAGARIDKSGKEIFHKFEVYNKMRKALLEIGIDISNYSREELDEIGYIMTINTDKEAMMEAFQKSWIDLSDDVKQCLINMRKTNGALFNKWQSFSLKIMNELIPEMYAQPKEQMTLLTEMGVTKGTQEEFAGLKYIPVDVVSEDIFNPVVRRSVRISFKILNAVLKKYKALDTIVIEMPRDRNSEEQKKRINDSQKLNEKEMEYIEKKLAVTYGIKLSPSDFSSQKQLSLKLKLWNEQDGICLYSGKTIDPNDIINNPQLFEIDHIIPRSISFDDARSNKVLVYRSENQKKGNQTPYYYLTHSHSEWSFEQYKATVMNLSKKKEYAISRKKIQNLLYSEDITKMDVLKGFINRNINDTSYASRLVLNTIQNFFMANEADTKVKVIKGSYTHQMRCNLKLDKNRDESYSHHAVDAMLIGYSELGYEAYHKLQGEFIDFETGEILRKDMWDENMSDEVYADYLYGKKWANIRNEVVKAEKNVKYWHYVMRKSNRGLCNQTIRGTREYDGKQYKINKLDIRTKEGIKVFAKLAFSKKDSDRERLLVYLNDRRTFDDLCKIYEDYSDAANPFVQYEKETGDIIRKYSKKHNGPRIDKLKYKDGEVGACIDISHKYGFEKGSKKVILESLVPYRMDVYYKEENHSYYLVGVKQSDIKFEKGRNVIDEEAYARILVNEKMIQPGQSRADLENLGFKFKLSFYKNDIIEYEKDGKIYTERLVSRTMPKQRNYIETKPIDKAKFEKQNLVGLGKTKFIKKYRYDILGNKYSCSEEKFTSFC

SEQ ID NO: 105 - protein, 1362 aa, Lactobacillus paracasei
MTKLGKPYGIGVDIGSNSIGFAAVDENSHLIRLKGKTVIGARLFEEGKAAAKRRAGRTTRRRLSRNRWRLSFLRDFFESHITPTDPNFFMRQKYSEISPKDKARYKYEKRLFNDRTDAEFYQQYSTMYHLRNRLMTDPSRADVREIYFAIHHILKSRGHFLTPGDAKDFNTNDVALDEIFPALQDAYAQVYPDLGITFDEDKANEFKTILLNEIATSIDTQRALVKLLLAEEDDKDILKQQKQVLTEFAKAVVGLKTKLNLALGTEVDSSEATAWNFSLGQLDDKWAGIESAMTDEGTEILDQIRDLYRARLLNGIVPTGKTLSQAKVDDYTQHHEDLQLFKAYLKQLEDDGTAKAIRQLYDRYIDGDDAAPFLRENFVKALTKDVTAHPNTKSPELLERLAQPDFMLKQRNKANGAIPVQMQQRELDQIIKNQAVYYDWLAAPNPVEKHRKSMPYQLDELLNFRIPYYVGPLVTAKEQKAAQGGVFAWMVRKDPEGNITPYNFDEKVDREASANTFIQRMKTTDTYLIGEDVLPKQSLLYQRYEVLNELNNVRVNNEKLSIEQKQQVIRELFERHNSVTIKQFAENLRAHGDYAHIPEIRGLADEKRFLSSLSTYRQLKSLLPEAIDDPAKQADIENIIAWSTVFEDAAIFKTKLKEISWLGSEAITKLSNIRYRGWGQFSRKFLNGLTLGNGHTIIQELLLSTNNLMQILTDETLQKKMTELNADKLKTANINDAIDNAYTSPSNKKALRQVLRVVDDIKRAADGQDPSWLYVETADGGGTPGKRTRARQHQLQEIYANAAHELIDTAVRGELEDKISDKADFNDRLVLYFMQGGRDIYTGAPLNIDQLSSYDIDHILPQSLIKDNSLDNRVLVHAIINREKNATFASTIYAQKMNATWRQWHEAGLISGRKLRNLQMRPDQIDKYASGFVARQLVETRQIIKLTEQIVAAQYPDTKIIAVKAGLSHQLREELEFPKNRDVNHYHHAFDAFLAARIGTYLLKRFPNLQAFFTYGKFTKADVKKLRGFNFIRDITHAEDKIVAKDTGEVVWDKQRDVDELDRIYNFKRMLITHEVRFETADLFKQTVYGARDSKEAGGSKQLIPKKKGYPVDIYGGYFRENTAYLAVVKVTKKTETIFKVVKIATSQVAALNKARSRSTAEELSVLTELLKPKFSKVGKNGKITDTPFEVVLPRVPREQLFYNAKYGFFMVNSDTMFHNFQEIWVSRSDQKILQQIRKAKIDYPNVDQDLDNLFHNLADQIVKYFDLYSIAGFKEKISQSQNTFNDLAVDDTDQSVGKITVINELLKGAQANGMTGSLKVLKISTPFGFTQDKSGVLTKDSSIIYQSPTGLFERSVRLTDL

SEQ ID NO: 106 - protein, 1056 aa, Actinobacillus minor
MKALNYILGLDLGIASVGWAVVEIDQNELPIRLIDLGVRTFERAEVPKTGDSLALARRLARSSRRLVRRRAVRLLKAKRLLKQEGILQADDFHSSHLKPLPNNPWELRVKGLNHLLDRKEWAAVLLHLLKHRGYLSQRKNESKTDNKELGALLKGVSENRQLLQAQAFSTPAEIAIKKFQQEEGHIRNQRGAYSHTFDRNDLLAELRLLFQKQREFNNPYTSQSLEQAIAELLMWQKPALSGEAILKMLGKCTFEPSEYKAPKNSYSAEYFVWLTKLNNLRILENGADRGLTAEERQLLINQPFEKAKFTYAQARKLLELSDLAIFKGVRYGKDNAESATLMEMKAWHAIRKALESNGLKTEWNGLKTKPELLDKIGTAFSIYKTDEDISQYLNGELSPAVLNALLENLSFDKFIRLSLQSLAKILPLMEQGLRYDEACKQVYGDHYGKKEQLELRFLPKIPVEDIRNPVVLRTLSQARKVINGVVRLYGSPARIHIETGREVGKSFSERRDISKRQEENRNERQRAVEKFKEFFPHFVGEPKAKDILKMRLYEQQHGKCLYSGKELDLNRLLEKGYVEIDHALPFSRTWDDSFNNKVLVLASENQNKGNQTPYEWLNGKENAERWKLFQALVNGSRFPYSKKQRILTKYLDEDGFRERNLNDTRYVARFLCNFIEDNMQLVGQGKKRVFASNGQITALLRRSWGIQKVREDNDRHHAVDAVVVACSTRALQKKITDYVRYKEMNVFTGEKIDQETGEIIKFHFPEPWKFFRQEVEIRVFSETPAEDVVIALPDRPQANHEFIQPLFVSRAPTRKMTGQGHMETIKSAKRLAEGLSVSRVPLTQLKLKDLENMVNREREKALYEALKVRLEKFNNDPAKAFADPFYKKGGQQVKAVRVEQVQKSGVLVRQENGVADNASMVRVDVFIKGGKYFLVPIYTWQVAKGILPNRAATQGKEEEYWDIMDETAIFQFSLYQNDLIKLVTKKKTIFGYFNGLNRATSNINIKEHDLDKSKGKDGIYLEVGVKLALSLEKYQVDELGKNIQPCRSMKKRPPVR

SEQ ID NO: 107 - protein, 1081 aa, Neisseria flavescens
MTAFKPNPINYILGLDIGIASVGWAMVEIDEEENPIRLIDLGVRVFERAEVPKTGDSLAAARRLARSVRRLTRRRAHRLLRARRLLKREGVLQAADFDENGLIKSLPNTPWQLRAAALDRKLTPLEWSAVLLHLIKHRGYLSQRKNEGETADKELGALLKGVADNAHALQTGDFRTPAELAVNKFEKESGHIRNQRGDYSHTFSRKDLQAELVLLFEKQKEFGNPHISDGLKEGIETLLMAQRPALSGDAVQKMLGYCTFEPTEPKAAKNTYTAERFIWLTKLNNLRILEQGSERPLTDTERATLIDMPYKNKLTYAKARELLGLDDTAFFKGLRYGKDNAESATLMEMKAYHAIRRALEKEGLKDKKSPLSLSPELQDEIGTAFSLFKTDEDITGRLKGCLQPEILDALLKHINFDKFVQISLKALRRIVPLMEQGKRYDEACAETYGDHYGEKNSEEMLYLPPIPADEIRNPVVLRALSQARKVINGVVRRYGSPARIHIETAREVGKSFKDRKEIEKRQEENRKDREKAAAKFREYFPNFVGEPKSKDILKLRLYEQQHGKCLYSGKAIDIRRLNGKGYVEIDHALPFSRTWDDSFNNKVLVLGSENQNKGNRTPYEYLNGKDNSREWLEFKARVETSRFPHSKKQRVLLQKFDEKGFKERNLNDTRYVNRFLCQFVADHMQLTGKGKRRVFASNGQITNLLRGFWGLHKVRAENDRHHALDAVVVACSTVAMQQKITCFVRYKEMNAFDGKTVDKETGEVLHQKTHFPQPWEFFAQEVMIRVFGKPDGKPEFEEADTPEKLRALLAEKLSSRPEAVHEYVTPLFVSRAPNRKMSGAHKDTLRSAKRFVKHNEKISVKRVWLTEIKLADLENMVNYKNGREIELYEALKARLGAYGGNAKQAFDPKDNPFYKKGGQLVKAVRVEKTQESGVLLNKKNAYTIADNGDMVRVDVFCKVDKKGKNQYFIVPIYAWQVAENILPDIDCKGYRIDDSYTFCFSLHKYDLIAFQKDEKSKVEFAYYINCDSSNGRFYLAWHDKGSKEQQFRISTQNLVLMQKYQIDELGKEIRPCRLKKRPPVR

SEQ ID NO: 108 - protein, 1392 aa, Gemella haemolysans
MANKTWYLGLDIGSASVGWAATDTGYKIIRKNKKRLWGVRLFEEAKTAEDRRGYRSSRRRLARRKWRLNLLEELFTSEVKKVDENFFLRLKESQYHYEDKTHKVPYAIFNDKDYTDKDYYKDYPTIYHLRSKLMTEENPDIRKVFLAIHHIIKNRGHFLLQGQSFKDGNLNNLIKELLELDILHVGFEVTEEVVDKIADISLEKKTSKDKLNDIKELYPKEKQLLEVFRLIFGGKTSLDKLFAIDEYKELDAAIKSVSFKEKIYEEVRHDYEQVLSNYIELLDLAKLVYDSIILSDIKKEGKTLSESKVELFEKHRDDLLKLKNLVKNDSKLSEDKKVELYALIFKEDKDKGTNYVNYIRKSEEGKGCNYEDFKKFLVKELAKLEESSVKTEIIKDLELEQFLPLQRTKDNSVVPYQIHKEELVKILDNAARYHSFLNEKDESGYNVREKVIQLLEFRIPYYVGPLNSSKKAKEGGFAWSVRNTGYENTPVTPWNYSKVIDESASAEKFITNLTNKCTYLKGEDVLPKSSLLYSEFALLNELNALKYDGNRISLEARNTIIEKLFKQQGKKVTKTSIKNLLKAEGYIDGKGEITGIDITVKNDLKSYRDFKKILGNKFNSEHVENIILWITLYGESRKLIKAKIESVYGEVYSKDEITKMSRLVYKDWGRFSRKLLTELVSKKLYNEETGECLNIIGAMRQNNILFMELLADRFDYSKQIVEFNKELQEDVTEIAPEILDDLYVSPAVKRSIWQTVRIVEELKKIIGCAPAKIFVETTRSNQEKKKPTDSRKKQLELAYKAVKKDVKELEKEIGTINFDVLNDRLSSVEPSKLKAKKLYLYYTQLGRCMYSEEPINISELFDNNKYDIDHIYPQSKIKDDSFTNTVLVKRESNAAKTDRYPLGSDIQTPSNRRFWKFLKEKGLISDEKYNRLVRTEEFSDEELSGFIARQLVETSQSVKAVASILGELNPETSICYSKAENVSSFRQNFGKIKKGDRDSKNNDQLIKVREINDYHHAKDAYLNVVVGNVYDTKFTRNVFNFIKDKKDGRKYSLNKVFYENVSDSKTVAWEMDKTIHQVEKVMNNNNIMVTRRTSEQKGGLFDATVYKAKVAAKAKDGVYYPLKTSNSVVKDVAKYGGYTSIGIAYYSIFEYTIVNKKGEEKITRIIPIPIYISQNIKDSTALIEFGKSQIFCRAYEKIKDFKLLYRKLCIGSKININNYQYYIGGKSDERFYYDSAIQVTLDKKSEKYLKILSKYQNWKKENKDGELWENITKENNIELYNKLVEKMNSEIFTKKKSNKYNELNSEEIRNNFIKISVEEQAKVLLEILNLLTNKKSIFDLKSIDIKAARGKISFNLTSLIQFSIIEQSITGFYEKEITIIGDKGNDMENNNS

SEQ ID NO: 109 - protein, 702 aa, Helicobacter pullorum
MRKILKIDERIQFKEVDYTAKNPENKKFVEFKNLKKFCEILGAIVGDRALADSIARDMTLIKDEEELAQKLRGYGKFSQEQITQLSALHFSHHISLSLKALSEILPFMREGMRYDEACQEAKLQAKHNDKKSKFLPPFCESIYADELTNPVVHRAIAEYRKILNALIAKYGSVHKIHIELTRDVGKNFQEREKYKKEIESNYKARVQAMQECEKLGLTLSEGNILKLRLFREQNEICVYSGRKITLANLKEQGALEIDHILPYSRSSDDSYMNKVLVFTNENQNKGNKTPYEAFGGDSQKWGEIESLALRSGYPKKKAKRILDKGFGDREAGFKSRNIVDSGYIARLIANYTKEYLKFLPLDSHENTALIAGEKDSKIHVEAVKGMLTATMRHFWGLGSKNRYEHTHHAVDAIIIAYINAAMIQRFSQFRQNQESLKARFYAKELAKEEFKTQRAFFEPFSGFREQVLAKVGQIFVSRPPRKRARGALHEETFYSIDDKKLSETYGGKKGVQRALSLGKIRQIGTKIVANGPMVRVDIFKHTQSGRFYAVPIYTMDFALGILPNKAVVSGKDKDRIIKDWLEMDSCYEFCFSLFKDDVIEVQKRDMEKPELAYFVSLDASDGRIKVRHHCNDITKINENQKKLFSEAIEKEVVGRGSIQNLKVFKKYKVSPLGEIKEAKYEPRQPIALKTSPKKHRKQNNAQ

SEQ ID NO: 110 - protein, 1371 aa, Streptococcus dysgalactiae
MDKKYSIGLDIGTNSVGWAVITDDYKVPSKKFKVLGNTDRHSIKKNLIGALLFDSGETAEATRLKRTARRRYTRRKNRIRYLQEIFSSEMSKVDDSFFHRLEESFLVEEDKKHERHPIFGNIVDEVAYHEKYPTIYHLRKKLADSTDKADLRLIYLALAHMIKFRGHFLIEGDLNPDNSDMDKLFIQLVQTYNQLFEENPINASRVDAKAILSARLSKSRRLENLIAQLPGEKRNGLFGNLIALSLGLTPNFKSNFDLAEDAKLQLSKDTYDDDLDNLLAQIGDQYADLFLAAKNLSDAILLSDILRVNSEITKAPLSASMIKRYDEHHQDLTLLKALVRQQLPEKYKEIFFDQSKNGYAGYIDGGASQEEFYKFIKPILEKMDGTEELLAKLNREDLLRKQRTFDNGSIPHQIHLGELHAILRRQEDFYPFLKDNREKIEKILTFRIPYYVGPLARGNSRFAWMTRKSEETITPWNFEEVVDKGASAQSFIERMTNFDKNLPNEKVLPKHSLLYEYFTVYNELTKVKYVTEGMRKPEFLSGKQKEAIVDLLFKTNRKVTVKQLKEDYFKKIECFDSVEISGVEDRFNASLGTYHDLLKIIKDKDFLDNEENEDILEDIVLTLTLFEDKEMIEERLKKYANLFDDKVMKQLKRRHYTGWGRLSRKLINGIRDKQSGKTILDFLKSDGFANRNFMQLINDDSLTFKEAIQKAQVSGQGHSLHEQIANLAGSPAIKKGILQSVKVVDELVKVMGHKPENIVIEMARENQTTQKGQKNSRERMKRIEEGIKELGSQILKEHPVENTQLQNEKLYLYYLQNGRDMYVDQELDINRLSDYDVDHIVPQSFIKDDSIDNKILTRSDKNRGKSDNVPSEEVVKKMKNYWRQLLNAKLITQRKFDNLTKAERGGLSELDKAGFIKRQLVETRQITKHVAQILDSRMNTKYDENDKLIREVKVITLKSKLVSDFRKDFQFYKVREINNYHHAHDAYLNAVVGTALIKKYTKLESEFVYGDYKVYDVRKMIAKSEQEIGKATAKRFFYSNIMNFFKTEITLANGEIRKRPLIETNEETGEIVWDKGRDFATVRKVLSMPQVNIVKKTEVQTGALTNESIYARGSFDKLISRKHRFESSKYGGFGSPTVTYSVLVVAKSKVQDGKVKKIKTGKELIGMTLLDKLVFEKNPLKFIEDKGYGNVQIDKCIKLPKYSLFEFENGTRRMLASVMANNNSRGDLQKANEMFLPAKLVTLLYHAHKIESSKELEHEAYILDHYNDLYQLLSYIERFASLYVDVEKNISKVKELFSNIESYSISEICSSVINLLTLTASGAPADFKFLGTTIPRKRYGSPQSILSSTLIHQSITGLYETRIDLSQLGGD

SEQ ID NO: 111 - protein, 1007 aa, Helicobacter canadensis
MKVLGFDIGINSIGWAFVENNELKDCGVRLFTKAENPKTKESLALPRRNARSSRVRLRRRRSRLLSLKHIISKEFGLHYEDYIALDGNLPKAYTGKIESIYKLRYEALSQAISKEDLARVILHIAKHRGYMNKNQKTSQDSEKGAILSAIKENSNKIKHYQTAGEYFYKELFENLRDGTKEFKNIRNKAMKNEKTGNMESTYYNTILASDLEKELKLILEKQQAYHNYSDTFIKEVLEIAFYQRPLKDFSHLVGSCTFYENEKRACKNSYSAWEFIALGKIINTLESIKKDTGEIFSNEIITQILKEVLDKGSLSYTKLRKMINLDEKVKFKGLKYDKEGVEKTNLIEFKKLKEFKKALGEHNLERKTLDEIATHITLTKDENQLKKQLEQYALSQNQIDALAELDFNDHINLSFKALYEILPLMEKGKRYDEACNELGLKAKTSNQKSEFLPAFCDSIFAQELTNPIVNRAISEYRKVLNRLLKKYGKMHKIHIELARDAGLSKEARNKIEKEQKENKDINDKAEKTCKEFGLKPNAKNILKIKLWREQGEICAYSGKKITIDDLKEDKALEVDHIYPYSRSYDDSYNNKVLVFIKENQLKLNQTPYEAFGSNQEKWSKIQVLAQKLPYKKKNRILDENFKNKDQIEFISRNLNDTRYATSLIAKYTKEYLEFLPLSDDEDISLKSGEKGSKTHVQTMNGMLTSVLRHAWGFSQKDRNNHLHHALDAIIIAYSTNSIIKAFSDFKKNQEILKAKLYAKKLTSEEYKNQSKFTGFEKYRSKILEKLDSIFVSKPPNKNTKGALHEQTFYSYQDILEEYKTQEGLKRALECGKVRKIGTKYVVNDRMVRLDIFKKDNKFYGIPIYTMDFALGVLPNKVVTIGTDKDKIKKEWKTIDETYEFCFSLYKGDLVLIQKKEMQESEFAYYNGFDISSASISLEKHDNKFENLTENQKLLFPKAKEGDVEVRGIGIQGLKVFKKYMVTPLGEIQETRTEARQNIQPRKKHGLR

SEQ ID NO: 112 - protein, 1397 aa, gamma proteobacterium
MTKNYISPIAIDLGAKFTGVALYQYLEGADCTQEVAKGLLVDDRGNVTWSQEGRRGKRHQVRGYKRRKMAKRLLWLILDSEYGIKREEVTEPLLKFINGLLNRRGYTYISEEVDEESMNVSPLPFSEMMPDYFNSSAPLLEQLAKLLSDKNKLVRFRAEGKIPSNKNEFKKLLDTALDGKYKDEKKELSEAWGNILIASENVLKSTVDGHKSRSEYLANIKEDIKSNEELEKQISSKEIDGFYNLVGHLSNFQLRLLRKYFNDPNMSGVSYWDEKRLEKYFYQWVQGWHTKGGTDEAEKKNIILKTKGAPLLKTLKSLSADLTIPPYEDQNNRRPPKCQSVLLSDEKLTMHYPKWKEWVGQLVKQNDNAYLNENVTLANALHRIVERSRSIDPYQLRLLISITDAEKRNDLAGYKRLKLSLGSEVDEFLLLVKNIVDETKEAREGLWFETENKLFFKCGKTPPRKEKLKSTLLSAVLGKNLSDDEQSSFIEEFWKSGTPKIERRNVRGWCRLASQVQKTYGVYLKEYGLQQLHKLEAGKKLDDKPLALLYKNSGLIASKIGEALNIEPDEVSRFASPHSLAQIFNIIEGDVAGFNKTCRACTYENIWRMQEEKVESLLTNQLLSEIHGERKVPLKSAMCTRLSADSTRPFDGQMASIIEHIARKIAQHKIAQINDVPKEFSIDIPIIIESNQFSFTAELEEIKRGRGSAKAKKAKELGEKSKAGWVSKTERIKTSSEGICPYTGAPLGGSGEIDHIIPRSLTGRTKKTVFNSEANLIYCSSKGNHDKGNRVYVIEQLNDKYLKKQFSTSDVNLIKKKIKTTIQRFTEGGEKLRSFSELSREDQKAFRHALFVPELKSEVTSLLAVKNITRVNGTQAWLAKKIASLLAEHLDKQGRDYTLSAHQIDPWSVSKQRKMLASAEPIWAKKDPQPAASHVVDAVCTFLEALEQPHTASRLKTISSTSFEKTGWRSALIPDLIKVDALDRRPKYRRYNIGSTSLFKDGIYAERFLPILIDENGLMAGYDIDNSLKAKGADVVFESLSPFLLFKGEEVGAQSLSDWQERIDGRYLYMSIDKVKAFDYLQEKVGEKDIAAELLNSIHFTQRKTELRAKFSDDSGKKMKTLDAIRKSLKLTVTVNEIGKRKEKCGFSGTIGIPAKSAWENLLDEPLLETYWGTKMPPQEIWEKVYRKHFPRNIPNQAHRKVRKDFSLPVVDSVSGGFRVKRKTPNGYNYQLLAIDGYSAVGFKKEGDNVDFKSPALVPQIAESKSVTPISSELVHLDKNEIVYFDEWRKIDISDSDLKQFVSSLELAPGSQNRFYIRFTVDEDQFERHFKSALRVNGIQDLDTVNKTFDWNREIPSLLIPPRSNLFLLETGQKITFEYIANGANAEVKKAYSLRRA

SEQ ID NO: 113 - protein, 1082 aa, Neisseria meningitidis
MAAFKPNPINYILGLDIGIASVGWAMVEIDEEENPIRLIDLGVRVFERAEVPKTGDSLAMVRRLARSVRRLTRRRAHRLLRARRLLKREGVLQAADFDENGLIKSLPNTPWQLRAAALDRKLTPLEWSAVLLHLIKHRGYLSQRKNEGETADKELGALLKGVADNAHALQTGDFRTPAELALNKFEKESGHIRNQRGDYSHTFSRKDLQAELILLFEKQKEFGNPHISGGLKEGIETLLMTQRPALSGDAVQKMLGHCTFEPAEPKAAKNTYTAERFIWLTKLNNLRILEQGSERPLTDTERATLMDEPYRKSKLTYAQARKLLGLEDTAFFKGLRYGKDNAEASTLMEMKAYHAISRALEKEGLKDKKSPLNLSPELQDEIGTAFSLFKTDEDITGRLKDRIQPEILEALLKHISFDKFVQISLKALRRIVPLMEQGKRYDEACAEIYGDHYGKKNTEEKIYLPPIPADEIRNPVVLRALSQARKVINGVVRRYGSPARIHIETAREVGKSFKDRKEIEKRQEENRKDREKAAAKFREYFPNFVGEPKSKDILKLRLYEQQHGKCLYSGKEINLGRLNEKGYVEIDHALPFSRTWDDSFNNKVLVLGSENQNKGNQTPYEYFNGKDNSREWQEFKARVETSRFPRSKKQRILLQKFDEDGFKERNLNDTRYVNRFLCQFVADRMRLTGKGKKRVFASNGQITNLLRGFWGLRKVRAENDRHHALDAVVVACSTVAMQQKITRFVRYKEMNAFDGKTIDKETGEVLHQKTHFPQPWEFFAQEVMIRVFGKPDGKPEFEEADTPEKLRTLLAEKLSSRPEAVHEYVTPLFVSRAPNRKMSGQGHMETVKSAKRLDEGVSVLRVPLTQLKLKDLEKMVNREREPKLYEALKARLEAHKDDPAKAFAEPFYKYDKAGNRTQQVKAVRVEQVQKTGVWVRNHNGIADNATMVRVDVFEKGDKYYLVPIYSWQVAKGILPDRAVVQGKDEEDWQLIDDSFNFKFSLHPNDLVEVITKKARMFGYFASCHRGTGNINIRIHDLDHKIGKNGILEGIGVKTALSFQKYQIDELGKEIRPCRLKKRPPVR

SEQ ID NO: 114 - protein, 1334 aa, Listeria monocytogenes
MKKPYTIGLDIGTNSVGWAVLTDQYDLVKRKMKISGDSEKKQIKKNFWGVRLFEKGETAAKRRMSRTARRRIERRRNRISYLQEIFAIQMNEVDDNFFNRLKESFYAESDKKYNRHPFFGTVEEEVAYYKDFPTIYHLRKELIDSQKKADLRLVYLALAHIIKYRGHFLIEGALDTKNTSIDEMFKQFLQIYNQVFANDIEEASLKKTEKNQEVAQILAEKFTRKDKLDKILSLYPGEKTTGVFAQFVNIIVGSTGKFKKHFNLHEKKDINCAEDTYDTDLESLLAIIGDEFAEVFVAAKNAYNAVVLSNIITVTDSTTRAKLSASLIERFENHKEDLKKMKRFVRTYLPEKYDEIFDDTEKHGYAGYISGKTKQADFYKYMKATLEKIEGADYFIAKIEEENFLRKQRTFDNGVIPHQLHLEELEAILHQQAKYYPFLREDYEKIKSLVTFRIPYFVGPLAKGQSEFAWLTRKADGEIRPWNIEEKVDFGKSAVDFIEKMTNKDTYLPKENVLPKHSLCYQKYMVYNELTKVRYIDDQGKTNYFSGQEKQQIFNDLFKQKRKVKKKDLELFLRNINQIESPTIEGLEDSFNASYATYHDLLKVGMKQEILDNPLNTEMLEDIVKILTVFEDKRMIKEQLQQFSDVLDGTVLKKLERRHYTGWGRLSAKLLVGIRDKQSHLTILDYLMNDDGLNRNLMQLINDSNLSFKSIIEKEQVSTTDKDLQSIVAELAGSPAIKKGILQSLKIVDELVSVMGYPPQTIVVEMARENQTTNKGKNNSKPRYKSLEKAIKEFGSQILKEHPTDNQELKNNRLYLYYLQNGKDMYTGQELDIHNLSNYDIDHIVPQSFITDNSVDNLVLTSSAGNREKGDNVPPLEIVQKRKIFWEKLYQGNLMSKRKFDYLTKAERGGLTEADKARFIHRQLVETRQITKNVANILHQRFNYKTDGNKDTMETVRIVTLKSALVSQFRKQFQFYKVREVNDYHHAHDAYLNGVVANTLLKVYPQLEPEFVYGEYHQFGWFKANKATAKKQFYTNIMLFFAQKDRIIDENGEILWDKRYLETVKKVLGYRQMNIVKKTEIQKGEFSNVTPNPKGKSNKLIPRKKDWDPIKYGGFDGSKMAYAIIIEYEKQKRKVRIEKKLIQINIMEREAFEKDEKTFLEEKGYHQPKVLIKVPKYTLYECKNGRRRMLGSANEAHKGNQMLLPNHLMALLYHAEKYEAIDGESLAYIEVHRALFDELLAYISEFARKYTLSNDRLDEINMLYERNKDGDVKSIAESFVSLKKFNAFGVHQDFSFFGTKIERKRDRKLNELLNSTIIYQSITGLYESRKRLDN

SEQ ID NO: 115 - protein, 1337 aa, Enterococcus faecalis
MKKDYVIGLDIGTNSVGWAVMTEDYQLVKKKMPIYGNTEKKKIKKNFWGVRLFEEGHTAEDRRLKRTARRRISRRRNRLRYLQAFFEEAMTALDENFFARLQESFLVPEDKKWHRHPIFAKLEDEVAYHETYPTIYHLRKKLADSSEQADLRLIYLALAHIVKYRGHFLIEGKLSTENISVKEQFQQFMIIYNQTFVNGESRLVSAPLPESVLIEEELTEKASRTKKSEKVLQQFPQEKANGLFGQFLKLMVGNKADFKKVFGLEEEAKITYASESYEEDLEGILAKVGDEYSDVFLAAKNVYDAVELSTILADSDKKSHAKLSSSMIVRFTEHQEDLKKFKRFIRENCPDEYDNLFKNEQKDGYAGYIAHAGKVSQLKFYQYVKKIIQDIAGAEYFLEKIAQENFLRKQRTFDNGVIPHQIHLAELQAIIHRQAAYYPFLKENQEKIEQLVTFRIPYYIGPLSKGDASTFAWLKRQSEEPIRPWNLQETVDLDQSATAFIERMTNFDTYLSSEKVLPKHSLLYEKFMVFNELTKISYTDDRGIKANFSGKEKEKIFDYLFKTRRKVKKKDIIQFYRNEYNTEIVTLSGLEEDQFNASFSTYQDLLKCGLTRAELDHPDNAEKLEDIIKILTIFEDRQRIRTQLSTFKGQFSAEVLKKLERKHYTGWGRLSKKLINGIYDKESGKTILGYLIKDDGVSKHYNRNFMQLINDSQLSFKNAIQKAQSSEHEETLSETVNELAGSPAIKKGIYQSLKIVDELVAIMGYAPKRIVVEMARENQTTSTGKRRSIQRLKIVEKAMAEIGSNLLKEQPTTNEQLRDTRLFLYYMQNGKDMYTGDELSLHRLSHYDIDHIIPQSFMKDDSLDNLVLVGSTENRGKSDDVPSKEVVKDMKAYWEKLYAAGLISQRKFQRLTKGEQGGLTLEDKAHFIQRQLVETRQITKNVAGILDQRYNANSKEKKVQIITLKASLTSQFRSIFGLYKVREVNDYHHGQDAYLNCVVATTLLKVYPNLAPEFVYGEYPKFQAFKENKATAKAIIYTNLLRFFTEDEPRFTKDGEILWSNSYLKTIKKELNYHQMNIVKKVEVQKGGFSKESIKPKGPSNKLIPVKNGLDPQKYGGFDSPVVAYTVLFTHEKGKKPLIKQEILGITIMEKTRFEQNPILFLEEKGFLRPRVLMKLPKYTLYEFPEGRRRLLASAKEAQKGNQMVLPEHLLTLLYHAKQCLLPNQSESLAYVEQHQPEFQEILERVVDFAEVHTLAKSKVQQIVKLFEANQTADVKEIAASFIQLMQFNAMGAPSTFKFFQKDIERARYTSIKEIFDATIIYQSTTGLYETRRKVVD

SEQ ID NO: 116 - protein, 1426 aa, Capnocytophaga ochracea
MKNILGLDLGTTSIGFAHIVEDENKEKSEIKELGVRIVSLTTDEQSDFEKGKSITTNANRTLKHGARLNLDRYQQRRKYLIDLLQKANLITPSSILAENGKNTTHSTWQLRAKAVTERIEKEEFARILLAINKKRGYKSSRKAKTEDEGQAIDGMAIAKRLYDENLTPGQLSLQLLQQNKKLLPDFYRSDLQKEFDLVWNFQKQFYPDILTDIFYKELQGKGKDATSKAFSKRYHFDTTENKGSKESVRLQAYQWRAEAISKQLSKEEVAYVLTEINNNLNNASGYLGAISDRSKELYFNRQTVGQYLYAKLQENRHNSLKNKVFYRQDYLDEFERIWETQASFHKELTDELKKQIRDVVIFYQRKPKSQKGLISFCEFESKEIEIEKDGKTITKNIGARVVPKSSPLFQEFKIWQILNNVICKRKGIRKKKISAKTTQLDLLNESSQTIFSLDMECKQLLFDELNLKGDLKSDKVLKLLGYSPQEWEINYNQLEGNRTQKALYEAYLKIVEMEAHDVKDILQIKSAKDDWSLDESPLSASEIREKVKAIFQTLGICTKILYFDPLLPVKEFEEQDSYQLWHLLYSYESDDSTSGNETLYRILEKKYAFKREHARILANVALQDDYGSLSTKAIRKIYPNIKENQYSTACEKAGYKHSKLSLTTEELEARELKNIIPLLKKNALRNPVVEKILNQMINVVNALIEKNSERDAEGKITKYFHFDEIRIELARELKKNAQKRYEMTQNINKAKLEHQKISEILQKEFGIKNPTKSDIIRYRLYQELEHNGYKELYTNAPIARDMLFSKNIEIEHIVPKARVFDDSFSNKTLTFHRINSDKGEYTAFDYITSLNSEEELNQYLTRVENAYKTKSISPTKYKNLLKKASEIGDDFINRDLRDTQYIAKKAKEILFQVTKNVLSTSGSITDRLREDWGLVDVMKELNMPKYQSLGLTEVEERKDGNKVTVIKNWTKRNDHRHHAMDALTVAFTKPSYIQYLNHLNARKDENNKNYSVILAIEEKETIKVPTNNGKNKRVFIEPIPNFRQVAKKHLEEIFISHKAKNKVVTKNTNKPAGTDKQQITLTPRGQLHKETIYGKYQYYINKEEKIGVKFDERTIAKVSNPVYREALLKRLQANDNDPKKAFAGKNALSKNPIYLDESKTKTLPEKVNLTYLEEDFSIRKDISPDNFKDLKSIEKVIDQGVKRILIKRLQAYDNDPKKAFVDLEKNPIWLNKEKGIAIKRVTISGVNNAQPLHIGKDHLGKTTLNKEGKEIPVDYVSTGNNHHVAIYRDKEGNLQEQIVSFFDAVVRAQQGIPIIDKTYKQAEGWQFLFTMKQNEMFVFPNATTGFNPAEIDLLDPKNKKLISPNLFRVQKIATKDYFFRHHLETNVETDNILKNVTWKREGLSGLKDIVKVRINHLGDIVSIGEY

SEQ ID NO: 117 - protein, 1424 aa, Parabacteroides sp.
MKRILGLDLGTNSIGWALVNEAETDEEVSSIIRLGVRVNPLTVDETQNFEKGKSITTNAERTLKRSMRRNLQRYKLRRDALVEFLKELGFITDETILSEQGNRTTFETCRLRAKAAEEEISLEELSRVLLMINKKRGYKSSRKVKKEEDGVLIDGMEIAKKLYEEDLTPGQLCSQLLESGKKVLPDFYRSDLQEELDRIWSVQKQFHPDVFCDAAKEEIKGKNRSQTWAILANYFVWKEEVVGWNDREAKNETIEKECKLVGLKRTTKGYELKKENYRWRAQALTEQLGLEEIAVVLQEINGQINASSGYLGAISDRSKVLYFNHQTVGQYQMAELDKNPHASLRNMVFYRQDYLDEFDRIWEKQAEFHKELTAELKKEIRDMIIFYQRRLKSQKGLISFCEFERLEIVVEKDGKKQTKVIGCKVIPRSHPLFQEFKVWQTLNDIKVLGREKKRNALSASESRALYPEEKEILARELAIKENMKKADVLKLLFENPQELDLNFKQIDGNRTGFSLFSAYSKMIEKYGYEPLDFKKPADEIIGQLRTIFTDLGWNTNLFTIDLTKEGKELEMQPYFRLWHLLYSFEGDNTSTGNGKLIEKIMQLCGVEKEYAVELASLSFQDDYGSLSAKAIKRILPYLKEGNLYDVACEYAGYRHSKSSLTKEEIENKVLKGKLEVLPKNSLRNPVVEKILSQMVNVINTIIDTYGKPDEIRVELARELKKSAKEREELTKAIAKSTREHEEIRKLLQDEFGMMNVSRNDIIRYKLYEELKDNGYKTLYSNQYIPKEKIFSKEIDIEHIIPQSRLFDDSLSNKTLEYKAINIEKGNKTAYDFVKEKYGEEGLQQYINRCESLFNDKKAKLRKLKMEQKDIPDGFIDRDLRNTQYIAKKALAMLNEICRRVVATTGSITDQLREDWQLVDVMKELNLPKYEALGFVETYEDKDGRKIKRIKDWTKRNDHRHHAMDALTVAFTKDAFIQYFNNKNAAQDSGNRNHTNIIGIKTRYFDKGRALPPIPLEQFRIEAKQHLEKLLVSIKAKNKVVTVNVNRTKKRKGENTKIQQTPRGQLHLETVYGSHKQYVTKIEKVNASFDAAKIATVSKRAYRNALLKRLETFGNDPKKAFTGKNALEKNPLYADKYQTIRVPEKVQTVEFETIYTIRKPVDPALNVDKVVDVKVRAILERRLKEYGGDPKKAFVNFWENPIWLNKEKGISIKRVSIRGINNAQSIHVKKDKNGNPIWDENGKQIPVDFVNTGNNHHVAIYRKPVLDKKGQVTFDEDGNLMYELDEVVVPFFEAVTRANLGLPIIDKDYRKSEGWQFLFSMKQNEYFVFPNEKTGFNPKEVDLLNPDNYAMISPNLFRVQTMSKVMYGNNVVRDYKFRHHLETTVKDMKELKDIAYKQYKTLSFGNSVVKIRINHIGQIVSVGEY

SEQ ID NO: 118 - protein, 1395 aa, Lactobacillus jensenii
MKEIKDYIIGLDIGTNSCGYVVTDKQNNILKLKGKTAIGARLFKEGQAAADRRSFRTTRRRLARRHWRLGLLEEIFDPEMEKIDPNFFRRLKESDYSPKDSRKQFNAIVFKSIKADKRFYKKYPTIYHLRNALMHDNQKHDLREIFMAVHHIVKYRGNFLREDSVNAFKAAKFSLRGEDGIGPVDKLNDLLKEIYSEYSPELATNNLSKIEDIIKDKNLYKQDKLKQVATLLIKEADSKDKAKLNKDIAKQVANSFMGYMFRLDTLFSLTDVDVKDYKLKFSDANIDESLDDLTSLLTDAQIEFVLELQSIYNTIVLNEIVPDGMSLSESMIKKYDDHKEDLKIFKEYIDSLSDQKKAKKLLSAYNLYVNYRKSDLVEAKNLFKNKKVGDKNFADVISNFEVFGKFVSDNLDDSELANKIKARLDLGEFLPKQRTNQNGVIPYQLHQVELTQILEKQGKYYPFLITPNPVESHRNNAPYEISELVSFRVPYYVGPLIDNQSIKDKQNKNKFAWMVRQKQGQITPWNLEEMVDTTESANQFIKRMTRKDTYLLAEDVLPKSSLVYQKFMILDELNRIKIDGKKLTSELKHDIFEKLFKKQKSINLDNLKNYLLVEGNIPGLIEGLSDGINFNNSFSTYIDYRNIFGDEIDNPNKQADFEKMIEWSTVFEDRKIFKRKLKEITWLTSEQIKQVSSKRYSGWGRLSKKLLTQITDENGVNILQRLWNEPETLTEVLANPVIKRKIVEANSSFTKAKDMKDILVEAYTSPQNKKAIRQVMRVVDDIIAAAHGKKPSQIAIEFAREDQDNPQMTKSRKAQLDQIYAKISDEFLDDAVKNELKNMKDNKPLAKDKVFLYFKQMGRDAYSGEKLSLDNLQDYDIDHIYPQSFIKDDSFDNRVLVQRAYNNGKSDNVPVLLFGNKIAAGLGITIRQMWKKWLELGLISKRKFNNLITDPEKISRNMASGFVNRQLVETSQVIKLVANILQAKLPDTEIIEVKASYNSILRKEFNLYKSREVNDYHHAIDAYLTTIVGNYLYQVYPKLRPYFVYGQFKKFGKAENQEDDPVKKIKKFNFIYQLIWGKDDAICISHTNQQVFSKKDIIDKLTTAYNFKYMNISHAVYTRNNNMFKQTLFPIIERTTAKTKSLIPKKLDRPTDIYGGYSNNNDAYLALVKVDKKRGSEYRVVGIPMRAAAMLKASKNYDEDLRKVIEPMVMFDKNGKAKRGIEGFRVLVGKMPFKQAVLDGNKKFMLTGTVDTPNLKQLVLSQQNMKYILDYIEDVDCRKHKFGDKVQNPDKCLLEVFDEIIEIVDKYFELFDSRDFREKLRNSRNKFIKLEASKKADTILAILKGLQAKSTRATIKELNISDFGRIITSSISPEAQLIYQSPTGLFERRVKVKDL

SEQ ID NO: 119 - protein, 1140 aa, Roseburia intestinalis
MRENGSDERRRNMDEKMDYRIGLDIGIASVGWAVLQNNSDDEPVRIVDLGVRIFDTAEIPKTGESLAGPRRAARTTRRRLRRRKHRLDRIKWLFENQGLINIDDFLKRYNMAGLPDVYQLRYEALDRKLTDEELAQVLLHIAKHRGFRSTRKAETAAKENGAVLKATDENQKRMQEKGYRTVGEMIYLDEAFRTGCSWSEKGYILTPRNKAENYQHTMLRAMLVEEVKEIFSSQRRLGNEKATEELEEKYLEIMTSQRSFDLGPGMQPDGKPSPYAMEGFSDRVGKCTFLGDQGELRGAKGTYTAEYFVALQKINHTKLVNQDGETRNFTEEERRALTLLLFTQKEVKYAAVRKKLGLPEDILFYNLNYKKAATKEEQQKENQNTEKAKFIGMPYYHDYKKCLEERVKYLTENEVRDLFDEIGMILTCYKNDDSRTERLAKLGLVPIEMEGLLAYTPTKFQHLSMKAMRNIIPFLEKGMTYDKACEEAGYDFKADSKGTKQKLLTGENVNQTINEITNPVVKRSVSQTVKVINAIIRTYGSPQAINIELAREMSKTFEERRKIKGDMEKRQKNNEDVKKQIQELGKLSPTGQDILKYRLWQEQQGICMYSGKTIPLEELFKPGYDIDHILPYSITFDDSFRNKVLVTSQENRQKGNRTPYEYMGNDEQRWNEFETRVKTTIRDYKKQQKLLKKHFSEEERSEFKERNLTDTKYITTVIYNMIRQNLEMAPLNRPEKKKQVRAVNGAITAYLRKRWGLPQKNRETDTHHAMDAVVIACCTDGMIQKISRYTKVRERCYSKGTEFVDAETGEIFRPEDYSRAEWDEIFGVHIPKPWETFRAELDVRMGDDPKGFLDTHSDVALELDYPEYIYENLRPIFVSRMPNHKVTGAAHADTIRSPRHFKDEGIVLTKTALTDLKLDKDGEIDGYYNPQSDLLLYEALKKQLLLYGNDAKKAFAQDFHKPKADGTEGPVVRKVKIQKKQTMGVFVDSGNGIAENGGMVRIDVFRVNGKYYFVPVYTADVVKKVLPNRASTAHKPYGEWKVMEDKDFLFSLYSRDLIHIKSKKDIPIKMVNGGMEGIKETYAYYIGADISAANIQGIAHDSRYKFRGLGIQSLDVLEKCQIDVLGHVSVVRSEKRMGFS

SEQ ID NO: 120 - protein, 992 aa, Treponema vincentii
MQKNSGEDENCGFEFLTEEEKELIKPLFFRISKPSFQFADIEKKLKGKNGFWKFNYRKDTNVSGCPVSAGLKNIFGDEASAESWKDKKVGQYDMCDIWHVLFDFDDEEKLLEFAKRKLFLSDEAAKKFCAIRIQQGYANLSLKAIRKITPFLRKGYIYSTAVFLANIPFMIGRDIFLQNEKEIEDSVKNIIGTLRDKNNIIVLANRCIESAFKDKDNDFRFEEWDKALVENSAWDLFGKKKWNEYDEEKRKTIISQVSEKVEDNLKIAVGKNPNDYKYPLLRTDDLIMDYLNQKGFVVKGELYHPSDTDYNFETPVPAEDGKIYLASPRSPSVKNPVVMRALHQLRKLVNYLIKTGKIDSTTKINVELANDVNDKNQRKAIEELAKTNEKNNADARKKIEELCNEAGFKVVPTESDIKKFRLWKEQNETCPYTGKHISFTDLFGPIPKFDFEHTIPRSLSYDDSLENLTLCDSEFNRNIKKQRLPSELPDFEEINKRFLKFYEDKIDNCLRIIELNSKSGGSYEEPAVKDLRIVKKHKAQYELNYYKEKLRRFSSTEITSGFKHSQLNDTRIITKFSLSYLKGVFDHVQPVKGSMTDTFKRQWGLMERNEIKDRSNHTHHTVDALTVACINRGKFNLLSEAIKNSSDGKHLKFPKPWETFDTDVLNAVRYIIPKYFSDESSLRQSKKILRGRDGKPVLKNGKAVFIQGATARGSLHKDTFYGCIKTVPEKGGKSEMIFVQRIPVSTLDEKVAEKIIDKRIRKTFEKNLSTGIQTLQEIQTDGILLPFKKEGRDVFVKRVRIKAHPTSPIILKKHHNVINKNPKDYKQNYYVENEENYLLAIYRGKDAKGKDVSDHKLCNLLNAVKSRQNKTGFYPDFKEKKGINLQLYKVLKIGKIVILQNDIQEDVFALPKEKLWKRMYRIAGLATSRNDIQIKLVHIIRETPWGYMKGEKDLNAGKECLLYGTANFKGLVEGQDFTVSPAGEIIQKARVC

SEQ ID NO: 121 - protein, 1340 aa, Enterococcus faecium
MKKEYTIGLDIGTNSVGWSVLTDDYRLVSKKMKVAGNTEKSSTKKNFWGVRLFDEGQTAEARRSKRTARRRLARRRQRILELQKIFAPEILKIDEHFFARLNESFLVPDEKKQSRHPVFATIKQEKSYHQTYPTIYHLRQALADSSEKADIRLVYLAMAHLLKYRGHFLIEGELNTENSSVTETFRQFLSTYNQQFSEAGDKQTEKLDEAVDCSFVFTEKMSKTKKAETLLKYFPHEKSNGYLSQFIKLMVGNQGNFKNVFGLEEEAKLQFSKETYEEDLEELLEKIGDDYIDLFVQAKNVYDAVLLSEILSDSTKNTRAKLSAGMIRRYDAHKEDLVLLKRFVKENLPKKYRAFFGDNSVNGYAGYIEGHATQEAFYKFVKKELTGIRGSEVFLTKIEQENFLRKQRTFDNGVIPHQIHLSELRAIIANQKKHYPFLKEEQEKLESLLTFKIPYYVGPLAKKQENSPFAWLIRKSEEKIKPWNLPEIVDMEGSAVRFIERMINTDMYMPHNKVLPKNSLLYQKFSIYNELTKVRYQDERGQMNYFSSIEKKEIFHELFEKNRKVTKKDLQEFLYLKYDIKHAELSGIEKAFNASYTTYHDFLTMSENKREMKQWLEDPELASMFEEIIKTLTVFEDREMIKTRLSHHEATLGKHIIKKLTKKHYTGWGRLSKELIQGIRDKQSNKTILDYLINDDDFPHHRNRNFMQLINDDSLSFKKEIKKAQMITDTENLEEIVKELTGSPAIKKGILQSLKIVDEIVGIMGYEPANIVVEMARENQTTGRGLKSSRPRLKALEESLKDFGSQLLKEYPTDNSSLQKDRLYLYYLQNGRDMYTGAPLDIHRLSDYDIDHIIPRSFTTDNSIDNKVLVSSKENRLKKDDVPSEKVVKKMRSFWYDLYSSKLISKRKLDNLTKIKLTEEDKAGFIKRQLVETRQITKHVAGILHHRFNKAEDTNDPIRKVRIITLKSALVSQFRNRFGIYKVREINEYHHAHDAYLNGVVALALLKKYPQLAPEFVYGEYLKFNAHKANKATVKKEFYSNIMKFFESDTPVCDENGEIFWDKSKSIAQVKKVINHHHMNIVKKTEIQKGGFSKETVEPKKDSSKLLPRKNNWDPAKYGGLGSPNVAYTVAFTYEKGKARKRTNALEGITIMEREAFEQSPVLFLKNKGYEQAEIEMKLPKYALFELENGRKRMVASNKEAQKANSFLLPEHLVTLLYHAKQYDEISHKESFDYVNEHHKEFSEVFARVLEFAGKYTLAEKNIEKLEKIYKENQTDDLAKLASSFVNLMQFNAMGAPADFKFFDVTIPRKRYTSLTEIWQSTIIHQSITGLYETRIRMGK

SEQ ID NO: 122 - protein, 1363 aa, Lactobacillus rhamnosus
MTKLNQPYGIGLDIGSNSIGFAVVDANSHLLRLKGETAIGARLFREGQSAADRRGSRTTRRRLSRTRWRLSFLRDFFAPHITKIDPDFFLRQKYSEISPKDKDRFKYEKRLFNDRTDAEFYEDYPSMYHLRLHLMTHTHKADPREIFLAIHHILKSRGHFLTPGAAKDFNTDKVDLEDIFPALTEAYAQVYPDLELTFDLAKADDFKAKLLDEQATPSDTQKALVNLLLSSDGEKEIVKKRKQVLTEFAKAITGLKTKFNLALGTEVDEADASNWQFSMGQLDDKWSNIETSMTDQGTEIFEQIQELYRARLLNGIVPAGMSLSQAKVADYGQHKEDLELFKTYLKKLNDHELAKTIRGLYDRYINGDDAKPFLREDFVKALTKEVTAHPNEVSEQLLNRMGQANFMLKQRTKANGAIPIQLQQRELDQIIANQSKYYDWLAAPNPVEAHRWKMPYQLDELLNFHIPYYVGPLITPKQQAESGENVFAWMVRKDPSGNITPYNFDEKVDREASANTFIQRMKTTDTYLIGEDVLPKQSLLYQKYEVLNELNNVRINNECLGTDQKQRLIREVFERHSSVTIKQVADNLVAHGDFARRPEIRGLADEKRFLSSLSTYHQLKEILHEAIDDPTKLLDIENIITWSTVFEDHTIFETKLAEIEWLDPKKINELSGIRYRGWGQFSRKLLDGLKLGNGHTVIQELMLSNHNLMQILADETLKETMTELNQDKLKTDDIEDVINDAYTSPSNKKALRQVLRVVEDIKHAANGQDPSWLFIETADGTGTAGKRTQSRQKQIQTVYANAAQELIDSAVRGELEDKIADKASFTDRLVLYFMQGGRDIYTGAPLNIDQLSHYDIDHILPQSLIKDDSLDNRVLVNATINREKNNVFASTLFAGKMKATWRKWHEAGLISGRKLRNLMLRPDEIDKFAKGFVARQLVETRQIIKLTEQIAAAQYPNTKIIAVKAGLSHQLREELDFPKNRDVNHYHHAFDAFLAARIGTYLLKRYPKLAPFFTYGEFAKVDVKKFREFNFIGALTHAKKNIIAKDTGEIVWDKERDIRELDRIYNFKRMLITHEVYFETADLFKQTIYAAKDSKERGGSKQLIPKKQGYPTQVYGGYTQESGSYNALVRVAEADTTAYQVIKISAQNASKIASANLKSREKGKQLLNEIVVKQLAKRRKNWKPSANSFKIVIPRFGMGTLFQNAKYGLFMVNSDTYYRNYQELWLSRENQKLLKKLFSIKYEKTQMNHDALQVYKAIIDQVEKFFKLYDINQFRAKLSDAIERFEKLPINTDGNKIGKTETLRQILIGLQANGTRSNVKNLGIKTDLGLLQVGSGIKLDKDTQIVYQSPSGLFKRRIPLADL

SEQ ID NO: 123 - protein, 1234 aa, Prevotella tannerae
MPNFWSIFTENLQTYLMKTRILGLDTGTNSLGWAVVDRDENNQYTPICRGDLIFTEGVKQEKGIEFSLAAERTSYRASRRHYFRRRLRKVEVLKVLVKHKLCPPLSDEALNRWHTKKEYPLDEDFILWQRTNEADNKNPYHDRHICLHRKLNLKDSQTDRYTLGRALYHLTQRRGFLSNRLDQNEEAEETGKVKSAISELSKEMKEAGCEFLGDYFYLLYRTEGNRVRIRSRYTDREKHYLQEFKEICRVQELDEDLAKALEKTIFFQRPLKSQRQGVGKCTMEKGHSRCAVSHPLYEEYRLLCYLNNIRIKTPSDDRLRPLNAEEREKITPLFYKEKNFDFEKIAKKLAGKTPFGWIRDAEDWPYQFNYRMTQEAPACPTTAQLIKVFGEDWKAALAETYTMSAKQDGTLKTEDEICTDIWNVLYSFSSKEKLKEFGLKKLQLDEVQAKAFSEIRLTRDFASLSLKAIRKILFFLRTGEDYSKAIFLANIPTIVGEEIWNDIERRSRLLYKVDLALRPQEERDAEEHRTIAERIKAAVAAEVPDAPIDLLYHPSMIEAYPDAKRNERFDCYQLGSPKTNAVRNPMAMRSLHMVRKVINHLLRKHIIDEKTEIHIEYARELNDANKRQAIADWQRELSKRHTAYAQNIRQLYKAETGLVIEPTKADILKYQLWEEQQHVCLYTGKKIGIADFLGANPKFDIEHTIPRSRGGDSTQENLTLCESKFNRDIKRDKLPTELANYEEILARIEHWKKQCYALKLKRDGIRTHSGLEKSIKDSRIRRRHLVGLEYGYLKGKYDRFTMKEVPEGFSRRQGAGIGLISKYAGLFLKSLFKDPKNPNRSNVYVVKGAITAEFRKLWGLQQADEAKSRENHTHHCIDAYTIACIGPCEYAALAAYYRSDEEFKYGRRREKPQFEKPWPTFTEDLLKLQEELLIVHQTTDKLGKRDRRKVKTPRGKFLTGGDSARGRLHQETYYGAINYDGNIKYVVRKPLDSLTEKDLDKIVDETVMGIVKGAVEAKGSLKEALADGIYMNKEKGILIKRVRIFSDVSEPINLKQLRDVSTKEYKRHIHLRKDENYLFAIYEGIDKKKNKKQTETATVDYLDAAKFYKDSKRRDKANSLVGDYSKKNKLPLKCILKKRQMVLFYEHSPEEIRFKDKKDLSRRLYIVTSIAKDGRVKFLHHQAATATGIQSSPSPFTNDGEHQPYYRLSASNIKVLVAGIDFDINILGEITPKL

SEQ ID NO: 124 - protein, 1496 aa, Prevotella veroralis
MKTILGLDLGTNSIGWAKVCVDDNGNYLRDIKLGSRIIPMSQDVLGNFDKGVTESQTSVRTGFRGVRRIRERSLLRRERLHRVLHVLGYLPPHYDSAIGWNKNEPSTYGKFLNHGEPKLAWEHKEDGSMRFLFMESFHEMMADFAKSQPSLVSDGKKIPLDWTIYYLRKKALSQPIRKEELAWLLLNFNQKRGYYQLRGEEDDDNPTKCEEYYELKVVGIEADEEGKNGNTWYNVKLENGWIYRRQSKIPLDDWIGKVREFIVTTEYEKDGITLKKDKNGDVKRSFRSPSEDDWGLRKKRTEKLLDSSKMTVGAFVYDHLLAEPSDKIRGKFIRTIERKYYKKELYAILCEQSKYHEELRSGDYLNKCAEELYKNNQPHRNSLLTKDLAYLLLEDLIFYQRPLKTKKSLIAECPYEAYKYVDKETGEIKRQGIKCIAKSNPYYQEFRLWQFISNLRLFNKADDKEVTADYLPTQDDYVRLFAYLNDRKEINQETLLKEFFKLKKITVNSEKVFPIRWNYIEDKEKKYPCNETRHELLLALDRARIDHSWLEKPGQEYRLWHLLYSVESKEETKEALRKLKDDDAFVESFLKVKPFKREYGAYSEKAIKKLLAVMRMGSLWRETDICDTTKGNITKILQGEIDEKLKEKISASVSSYNQLSDFQGLPVWLACYVVYGRHSEAAEIQHWKTPESLLAYINGFKQHSLRNPIVEQCILETLRTVHDIWKEVGHIDEIHVELGRNMKSTADQRARISENVLRNENTNLRIKSLLLELKNDPNIKDVRPYSPMQQEKLRIYEEGVLQELTKDDKDFTEITKISTMAQPSAKELQRYKLWLEQKYRSPYTGKSISLTKLFTSAYQIEHVIPQSRYFDDSFSNKVICESEVNSLKDNMLGYEFIKNHGGEIIHCTMLGDVKVLSESEYKAFVNDHYAHNKRKRENLLLEDIPQEFLNRQMNDSRYISKVVKALLSNIVRAEGEEEATSKFVVSCSGGITDRLKKDWGLNDVWNKIVYPRFERLNRLTGTEAFGQWENKDGKRVFQTAVPLELQRGFNKKRIDHRHHAMDALVIACTSRNIINYLNNESANNPKKREDLRQKLCDKNRTIRKPWETFTQDATAALEDVIVSFKNYVRIINKATNYYERYDVEGKKVIAEQRGDDMWAIRKPMHEATYYGRVNLRRKKKVNLRVALENISSICDNKLRIYINGLVEKGFNTKQILDKFKNTNDHFSMQKIDKVEIWQFTNEEEKLVATRKPLDTSFDTKKIASITDTGIQTILLNYLETKGGDSTIAFTPEGIVEMNQNISKYNNGKEHMPILKVRLYTKLGKKIPVGQTGCKAKQFVIAEAGTNLYFAIYEDEEGKRSYRTIPLNEVVERLKQGLSPVPEKNDKDVHLKFYLSPNDLVYVPIEDEHESLAKDHIYKFVDSSGTTANFIPHRSANVIFELNKKDAEKFCSGSIIQNEYGVGSSQSKNQKAITGEMIKAVCRKLEVDRLGNVIKVI

SEQ ID NO: 125 - protein, 1082 aa, Neisseria cinerea
MAAFKPNPMNYILGLDIGIASVGWAIVEIDEEENPIRLIDLGVRVFERAEVPKTGDSLAAARRLARSVRRLTRRRAHRLLRARRLLKREGVLQAADFDENGLIKSLPNTPWQLRAAALDRKLTPLEWSAVLLHLIKHRGYLSQRKNEGETADKELGALLKGVADNTHALQTGDFRTPAELALNKFEKESGHIRNQRGDYSHTFNRKDLQAELNLLFEKQKEFGNPHVSDGLKEGIETLLMTQRPALSGDAVQKMLGHCTFEPTEPKAAKNTYTAERFVWLTKLNNLRILEQGSERPLTDTERATLMDEPYRKSKLTYAQARKLLDLDDTAFFKGLRYGKDNAEASTLMEMKAYHAISRALEKEGLKDKKSPLNLSPELQDEIGTAFSLFKTDEDITGRLKDRVQPEILEALLKHISFDKFVQISLKALRRIVPLMEQGNRYDEACTEIYGDHYGKKNTEEKIYLPPIPADEIRNPVVLRALSQARKVINGVVRRYGSPARIHIETAREVGKSFKDRKEIEKRQEENRKDREKSAAKFREYFPNFVGEPKSKDILKLRLYEQQHGKCLYSGKEINLGRLNEKGYVEIDHALPFSRTWDDSFNNKVLALGSENQNKGNQTPYEYFNGKDNSREWQEFKARVETSRFPRSKKQRILLQKFDEDGFKERNLNDTRYINRFLCQFVADHMLLTGKGKRRVFASNGQITNLLRGFWGLRKVRAENDRHHALDAVVVACSTIAMQQKITRFVRYKEMNAFDGKTIDKETGEVLHQKAHFPQPWEFFAQEVMIRVFGKPDGKPEFEEADTPEKLRTLLAEKLSSRPEAVHKYVTPLFISRAPNRKMSGQGHMETVKSAKRLDEGISVLRVPLTQLKLKDLEKMVNREREPKLYEALKARLEAHKDDPAKAFAEPFYKYDKAGNRTQQVKAVRVEQVQKTGVWVHNHNGIADNATIVRVDVFEKGGKYYLVPIYSWQVAKGILPDRAVVQGKDEEDWTVMDDSFEFKFVLYANDLIKLTAKKNEFLGYFVSLNRATGAIDIRTHDTDSTKGKNGIFQSVGVKTALSFQKYQIDELGKEIRPCRLKKRPPVR

SEQ ID NO: 126 - protein, 1512 aa, Fibrobacter succinogenes
MKKILGLDLGTNSIGWAVVNADEITRDDGSRYLKPNGISAAGSRIIPMSADILGDFEKGNSISQTAERTRMRMARRLHERALLRRERLLRVLNLLDFLPKHFADKIDRYGKFTDDSEPKLAWRKNTEGKYEFIFQDAFNEMLAEFKDKQPEIVEEGKKIPYDWTIYYLRKKALEKALSKEELSWILLQFNQKRGYYQLRGEEEEIPQDKKIEYLAQKVVKVEATDQKKGDDVWYNVYLENGMIYRRTSKAPLDWEGKVKEFIVTTEVENDGETPKKDKEGNIKRSFRAPKEDDWTLLKKKTEADIENSHKTVGCYIYDSLLNNPKQKIIGKLVRTVERKFYKEELTQILKKQVELIPELRDDNLYKQCIEELYPINEAHRNTIAKTDFANLFINDILFYQRPLKSKKSQIDNCPYEERIFIDSKTGEKKKVPVKCIAKSNPLFQEFRLWQFIQNLRIYQREKEIDGKLLTDIDITSECLKSEEDYVRLFDWLNDRETIEQEDLLKHLFNTKKSKNKENPYRWNYVEDKVYPCNETRATILKGFSKCGINASVLSPELEMALWHILYSVEDKKEIETALTHFAQKQGWNDDFAKVFSKAKPFKKDYGSYSEKAIKKLLSLMRMGKYWNQDNIDKNTLDRIDKIINGEYDEKISNRVRDNAINLKDISDFRGLPVWLACYIVYDRHSEAKDCTKWNSPEEIDSYLKKFKQHSLRNPIVEQVVTETLRTVRDIWIQEEQIDEIHLELGRDLKNPADKRKKMSENILKNENTNLRIKAMLMEFMNPSMGIENVRPYSPSQQDILRIYEENALDNLTKDDKDFDFISKISKQAQPSKTDIIRYKCWLEQKYRSPYTGKTISLSKLFTPAYEIEHVIPQSLYFDDSFSNKVICEAEVNKLKDRQLGYKFIAEHHGEKVQLSQGEVVEILSVDAYEKFVKENYANNRIKMKKLLMESIPDEFIERQLNDSRYISKVVKGLLSNIVREKIDDENYEPEAVSKNLISCNGAITDRLKKDWGMNDVWNSIILPRFIRMNQITGKDCFTTTNAEGHLIPQMPLELQKGFNKKRIDHRHHAMDAIVIACTTRDHVNLLNNEAAHSKFNATRYQLQRKLRRFEKAVIDGKEREVAKEFLKPWDSFSSDSKNILENIIVSFKQNQRVINKTTNAFLHFDENGKKTFIKQGKGDSWAIRKSMHKDTVFGEINLRKVRSVSLNEAIKVPERVLNKKIKEKILELKNNKIDAKNIKKYIEENHTGGYGIDSSKIDVFYFTKETKERFFATRKTLDTSFNQAKIKDSIADSGIQKILLAHLKSKNGDAEQAFSPDGIDEMNKNIVELNNGKFHQPILKVRVYEKADKFAVGQKGNKKVKFVEAAKGTNLFFAIFEKDGKRSYLTIPLNVMIDCQKQYGNQWKNNIEAYLKEKELVEKDVKLQFILSPNDLVYLPTEGSIDKKRIYKVVSFTNNRLYAIPYAIAKSIVDKNEFTQLNKIEFTDNKESIKDACVPVIIDRLGNVIEFNGKRL

SEQ ID NO: 127 - protein, 1259 aa, Streptobacillus moniliformis
MKYILGLDLGVASIGWAVTEINEKGEPVGLIDANSVIFKPLDNDKGKLYNVERRDKRGSRRILRRKKHRVERTKMLLVNSSFLTNEEIDNLYVGKLDNIYEVRLKGLKEQLSKNEIARLMIYYCKNRGFKSNRKTEDLEILKSLGEKISEKDSDEKKLKPIIAKNTELIESKGLTPIEVIYMIRENDNSILGFKNKEGNYKFGFKRNQVIDEVRKILGTQQILSKEIVDEYIDILSSQRDFSDGPGGDSKYKIDYTKLAGKCKYTGEVRAVKSAPSYEIFTMLQKLNDIRYVKFTSEDKIEKKKLSKEVIHKLYDLVVEKNKTLTYDLIEKSIDEENIKLLNIPKLSKSKYVELRKSYFKERNDNENLTEEEINAFNEKLNNERMKQELIRNNLKAYKELKSKFKKNNIDENRIKELGGIYFLDLVAELLTYSKTDEKLEYFVENVERYSLFKEQRDIVEIIKTFPNYTKNGNLSLSLVRELNKLLMEGHDYESSLSSLNYYIDTDVDWEKFPTISEIEDSLSTKITNPNVKHILVILRKLYNTLLFKYGRPEKVHLELSRDFSNDFSTRNKIQKEQLENKVRREVAAFEMYGANKDIVAGKDRLSNDDFVRIKLWEEQNKVCMYSGRTIEKYQLTSAEVQIDHILPYSKSFDNSYSNKVLVFSNENQDKKERTPYQWLKGTEKWNEFKQRVRLNLNISNKKKENLLFEDEVVNNEFLERELHATSYSSRLALNIFQRLIPVSDEDKYDEHGNEKVKYLYNRNVIAFQGKMTSMLRNLYSLNKYTHSFESDTLDIDNKAFILKEFEINKDNLKMTAYNVNTGLEITSETKVEKNKSGEFKTIKDELLKKELDKKENLIEISDYFKDKVLFDLKIVDFEEIDTVEPEIISILYKMITALKEEVYSKNRENHLHHSLDAFLLTIMNRSMQMKLIKYNQLISVLKNKEIEIFNEEKGEYIDSKEFAEELQKQKIIDIDGNERGIKFNVNGKTHRLNLVKPYENFLDDIKNKIFDKRENNKLPYHVVKSKVSGALHAETILGESKGEITKRISVFDINYKNLGKIFDKDGSQKEIYETLVKWLEAKSKDYPKLKNGNIIKKVKIVDGNKDKLIKLGNKRYVEMGRTTVKILVLKKEAEEGLKFASIGRYKYNLLKSEKDVNISIWKDAIHFCKVRYNKLKENGYRLIHELIPGETIELELNKGNISKCLVVGFSGGKIEISSVIGDALDLINDKISTRIKERYYITVSTIKSIKKINKNILGD

SEQ ID NO: 128 - protein, 1091 aa, Mobiluncus mulieris
MDSRKYRVGIDVGTNSVGFAAVEEDDSGSPTRFLNTMVVIHDSGVDPEQKKYAITRLASAGTARRTRRLYRTRRQRLRELDDFISNELGYPLVNLENFADPYEPWKVRADLATTKLPNDELPEAMSIALRHMARHRGWRSPYQRVEALHLHAEISKEFAALKERVVEKTGDVFSDDATPAEVLVDLMGRQKVRGADGVLSGKLRQSDNANELRKIASVQGIDDETLNRIIDRVFSSKSPKGKASERVGMDALPGQGSKPRALKAMPSFQKFRVVSVICNLRIKDSGGDARPLSMEEKEKLIDYLMSSTTDDHVTWTDVADLLHVKRSQLQGTAKEGFDGERPYTRPPVNSTWSKIKDSKIKSLVALWKTGDVDVQSAIVEALSNASVLEDSRPGADIVVAYLESLDDKELESLDKVGLPAGRASYSEDSLERLTERMLRDDCDLFEARKREFNVADDWKPPADPIYAPVGNPGVDRVLKIVNRLLMAAEREWGAPTQINIEHVRSGFSSELMQREFERENERRRAQNEEAVKAILTEKGGNSRVSKYDITRYYAVKRQHCQCLYCGTPITFSDCELDHIVPRKGVGSTNTRVNLAAACRSCNRDKSNLPFAVWAGKASNFDVSIDDAVSRVKQWQRSQNEGVREFRAFQNEVISRLLKTTEDPEIDSRSLESVAWMARELHHRVEYYFQSKGAQTQVSVYRGAVTAQARKSSGLEDKVKMIGGGGKTRLDRRHHAMDAATIALMTPGISTTLSEKNNLRDAQKFTGQSETWKDYCGRTETARKHFAVWKSNMERLTDLFNDKLENDAIPVVQPLRLRLSNSKAHDDGIGKLDSKKLGSVWSLADIDRAATPQIWTALTRCDDFDPTKGLPENANRVIRAQGVKYESEDNIPVFPSNVAAIAVRDGYAEIGSTIHHARIYRIDDGKKTFYSMIRVFAVDLLKHQAEDLFTVKLPPSAISIRTCEDSLRRALSNGTAEYLGWLVPGDEIIVDTSDKAFHTGQIGDLLRNFPVNSFRLTGFPSNSRLRLKPVLLAGEGLRDDAEDSIKKILLGQGWRPAINVLFSKGKPRIVRRNSLGIERPSSNNGLPFSWEA

SEQ ID NO: 129 - protein, 872 aa, Candidatus Parvarchaeum
MLGSSRYLRYNLTSFEGKEPFLIMGYYKEYNKELSSKAQKEFNDQISEFNSYYKLGIDLGDKTGIAIVKGNKIILAKTLIDLHSQKLDKRREARRNRRTRLSRKKRLARLRSWVMRQKVGNQRLPDPYKIMHDNKYWSIYNKSNSANKKNWIDLLIHSNSLSADDFVRGLTIIFRKRGYLAFKYLSRLSDKEFEKYIDNLKPPISKYEYDEDLEELSSRVENGEIEEKKFEGLKNKLDKIDKESKDFQVKQREEVKKELEDLVDLFAKSVDNKIDKARWKRELNNLLDKKVRKIRFDNRFILKCKIKGCNKNTPKKEKVRDFELKMVLNNARSDYQISDEDLNSFRNEVINIFQKKENLKKGELKGVTIEDLRKQLNKTFNKAKIKKGIREQIRSIVFEKISGRSKFCKEHLKEFSEKPAPSDRINYGVNSAREQHDFRVLNFIDKKIFKDKLIDPSKLRYITIESPEPETEKLEKGQISEKSFETLKEKLAKETGGIDIYTGEKLKKDFEIEHIFPRARMGPSIRENEVASNLETNKEKADRTPWEWFGQDEKRWSEFEKRVTSLYSKKKISERKREILLNKSNEYPGLNPTELSRIPSTLSDFVESIRKMFVKYGYEEPQTLVQKGKPIIQVVRGRDTQALRWRWHALDSNIIPEKDRKSSFNHAEDAVIAACMPPYYLRQKIFREEAKIKRKVSNKEKEVTRPDMPTKKIAPNWSEFMKTRNEPVIEVIGKVKPSWKNSIMDQTFYKYLLKPFKDNLIKIPNVKNTYKWIGVNGQTDSLSLPSKVLSISNKKVDSSTVLLVHDKKGGKRNWVPKSIGGLLVYITPKDGPKRIVQVKPATQGLLIYRNEDGRVDAVREFINPVIEMYNNG

SEQ ID NO: 130 - protein, 1229 aa, Pediococcus acidilactici
MGDRKYNLGLDIGTSSIGFAAVDENNQPIRVKGKTAIGVRLFEEGKTAADRRGFRTTRRRLSRRRWRINLLNEIFDAHLAEVDPTFLARLKESNRSNLDPKKSFQGSLLFPERKDYQFYEEYPTIYHLRKALMEKDRKFDIREIYLAVHHIIKYRGNFLNGTPMRSFKVENIELNTLFDQLNQLYAEIVPDNELAFDLAQVADVKDVLSSTTIYKMDKKKQLVKMMLLPASNKALQSENKKIVTQFVNAILNYKFKLDVLLQVETDADWSLKLNDEGADDKLEEFTGDLDENRLEIIDLLQRLHNWFSLNEITKDGNSLSAAMVEKYENHHHHLGLLKKVIENHPDAKKAKALKETYTAYVGKTDDKTQNQDDFYKAVEKNLDDSPDAKGIKRLIQLDQFMPKQRTGQNGAIPHQLHQQELDQIIEKQSKYYPFLAEPNPNVKRRKDAPYKLDELIAFKIPYYVGPLVTPEEQAQNKENVFAWMKRKAAGPITPWNFDEKVDRMESANRFIRRMTTKDTYLFGEDVLPAESMIYQKFVVLNELNNLKINGRHLSLKDKQDVYNDLFKQQKTVSIKALQNYYVTKKKAATAPTVGGLADPKKFLSSLSTYIDFKNMFGERVNDPQFQEDLEQIVEWSTIFEDRGIFKAKLQALGWLSEKQIQQLVAKRYKGWGRLSKKLLTGLKNAEGYSILDEMWRSTENFMQIQSRPEFAALIQQANEKQFEGNDPDNVWENIENILGDAYTSPQNKKAIRQVVKVVQDIEKAVGNPPEKIAIEFTREAAANPQRTQSRLRTLEKLYESAEEVVDAGLTAELAEFKENKHVLSDKYYLYFTQLGRDVYTGDTISLDKLNDYDVDHILPQSFIKDDSLDNRVLTIRAVNNGKSDNVPAKMFGKKMGSFWRHLLDNGMISKRKYNNLITDPDNISKYAQKGFINRQLVETSQVIKLTANILNGIYDKDTEIIEVPAKMNSQMRKMFDLVKVREVNDYHHAFDAYLTIFIGNYLYKCYPKLRPYFVYDNFKKFGNKEDIGHKRFNFLGKIEREKKVVAPETGEILWSNVAPNETIKQIKKVYNYKFMIVSREITTRRAELFNQTVYPKNYRGKLIPIKEDRPTDLYGGYSGNTDAYLAIVALEDKKKGKYFKVVGIPTRAAAKLEKLKQQDSQQYLQALHEVIAPQFTKSTKKGIKKTEFEIVLDKVHYRQLVQDGPVKMMLGSSTYKYNAKQLVLSEKAL

SEQ ID NO: 131 - protein, 1398 aa, Veillonella parvula
METQASNQLISSHLKGYPIKDYFVGLDIGTSSVGWAVTNKAYELLKFRSHKMWGSRLFDEGESAVARRGFRSMRRRLERRKLRLKLLEELFADAMAQVDPTFFMRLRESKYHYEDKTTGHSSKHILFIDKNYNDQDYFKEYPTVYHLRSELMKSGTDDIRKLFLAVHHILKYRGNFLYEGATFDSNASTLDDVIKQALENITFNCFDCNSAISSIGQILMEAGKTKSDKAKAIEHLVDTYIATDTVDTSSKTQKDQVKEDKKRLKAFANLVLGLNASLIDLFGSVEELEEDLKKLQITGDTYDDKRDELAKAWSDEIYIIDDCKSVYDAIILLSIKEPGLTISESKVKAFNKHKDDLAILKSLLKSDRSIYNTMFKVDEKGLHNYVHYIKQGRTEETSCNREDFYKYTKKIVEGLSDSKDKEYILSQIELQILLPLQRIKDNGVIPYQLHLEELKAILAKCGPKFPFLNEVADGFSVAEKLIKMLEFRIPYYVGPLNTHHNVDNGGFAWAVRKASGRVTPWNFDDKIDREKSAAAFIKNLTNKCTYLLGEDVLPKSSLLYSEFMLLNELNNVRIDGKPLEKVVKEHLIEAVFKQDHKKMTKNRIEQFLKDNGYISETHKHEITGLDGEIKNDLASYRDMVRILGDGFDRSMAEEIITDITIFGESKKMLRETLRKKFASCLDDEAIKKLTKLRYRDWGRLSQKLLNGIEGCDKAGDGTPETIIILMRNFSYNLMELLGDKFSFMERIQEINAKLTEGQIVNPHDIIDDLALSPAVKRAVWQALRIVDEVAHIKKALPARIFVEVTRSNKNEKKKKDSRQKRLSDLYAAIKKDDVLLNGLNNEIFGELKSSLAKYDDAALRSKKLYLYYTQMGRCAYTGEIIELSLLNTDNYDIDHIYPRSLTKDDSFDNLVLCKRTANAQKSDAYPISEEIQKTQKPFWTFLKQQGLISERKYERLTRITPLTADDLSGFIARQLVETNQSVKAATTLLRRLYPGVDVVFVKAENVTDFRHDNNFIKVRSLNHHHHAKDAYLNIVVGNVYHERFTRNFRAFFKKNGANRTYNLAKMFNYDVNCTNAKDGKAWDVKTSMDTVKKMMDSNDVRVTKRLLEQTGALADATIYKATVAGKAKDGAYIGMKTKSSVFADVSKYGGMTKIKNAYSIIVQYTGKKGEVIKEIVPLPIYLTNRNTTDQDLINYVASIIPQAKDISIIYGKLCINQLVKVNGFYYYLGGKTNSKFCIDNAIQVIVSNEWIPYLKVLEKFNNMRKDNKDLKANVVSTRALDNKHTIEVRIVEEKNIEFFDYLVSKLKMPIYQKMKGNKAAELSEKGYGLFKKMSLEEQSIHLIELLNLLTNQKTTFEVKPLGITASRSTVGSKISNQDEFKVINESITGLYSNEVTIV

SEQ ID NO: 132 - protein, 1485 aa, Prevotella bivia
MKNILGLDLGTNSIGWAKISIDDNGKYIKDSIKLGSRIIPMSQDVLSNFSKGVTLSQTSERTSFRGARRLRERTLLRRERLHRILHLLGFLPKHYEKAIGWDRNDNKTYGKFINHAEPKLAWCKDNNGKMRFLFMDSFHDMLSEFSEKHPELLANGKKIPLDWTIYYLRKKALYKAITKEELAWILLNFNQKRGYYQLRGEEDRDSEANKKEYLELKVIGVEATGEKKGNDIWYNIHLENGWIYRRSSKNPLNDWLGKVKSFIVTTDLDADGNPKKDKDGNIKRSFRAPSEGDWTLIKKRTESLLENSGQTVGQFIYNHILEEPSAKIRGNFIRTIERKYYKDELKAILEKQKEFHHELSSESLLTECAKELYKRNIAHQEVLLKKGIIHLLLNDILFYQRPLKIKKSLIDNCPYENYKYVDKKSGDIKVKSIKCIAKSNPFFQEFRLWQFVSNLRLYRKSDDKDVTSEHLVTTDDYANLFTYLNNRKDIKQSVLLKEYFKIKKVKTINGAEYPVRWNYIDDDNKTYPCNETRYDILHALSKTELKSEWLTPERTYRLWHLLYSIESKEETKKALNKLNLSDDFTEAFLTIKPFKKEYGSYSEKAIKKLLSLMRMGYLWSEDEAIKQVGAEIEKTIEGELPDYVLQRLEKSQHNYNKISDFSGLPLWLASYIIYGRHSEAKEIIHWDNPESMMAYIKDFRQHSMRNPIVEQCVLETLRTVHDIWKEIGHIDEIHIELGREMKSTSEQRKAITQNVLHNQNTNIRIKLLLQELKNDNNITGVRPYSPMQQEILRIYEEGALQGLTKEDKDYNDILKISQTAQPTSNELTRYKLWLEQKYRSPYTGKAISLSKLFTSAYQIEHVIPQSRYFDDSLSNKVICESEVNTLKKAMLGMEFIKTCGGQKVHCTLLGDVEIYNEEDYKAFVNEHYSNNRTKRNKLLMEDIPQEFINRQLNDSRYISKMVKQLLSAIVRGQEEVEATSKFVIPCTGGITDRLKKDWGLNDIWNNLVSPRFQRMNALTGSEYFGHWENKEGKRVFQTTMPIQLQQGFSKKRIDHRHHAMDALVIACASRNIISYLNNETAQDTERRRDLRQKLCDKGGSVRKPWDSFTQDTQYALKDIIVTFKNYVRIINKATNYYEHYKTDGKKGMISQKGDELWAIRKPMHKETVFGKVNLRRPKRVSLSKAIDSVDIICNRKLKKYIKARLNEGLQKKQILNIFKELNNVWEGIDVNKIDIWEMSNDKEPMVATRKQLDTSFDEKKIRSISDTGIQKILLNYLITKNNNPELAFTPEGIQEMNSNISEYNDHKKHQPIYKVRVTEPLGAKYPIGTMGNNPKKFVEAQAGTNLYFAIYEDKEGKRNYDTIPLNIAAERLNQQLSPVPETNENNTPLKFYLSPNDLVYVPSEEERHSGNNIQLDKNRIYKMVSSTSKRCFFIHHRVAISLVDKKEFSAQNKMERSIDNEQVMIKSVCWKLITDRLGNIIKVIK

SEQ ID NO: 133 - protein, 1218 aa, Prevotella buccalis
MNKRILGLDTGTNSLGWAVVDWDEHAQSYELIKYGDVIFQEGVKIEKGIESSKAAERSGYKAIRKQYFRRRLRKIQVLKVLVKYHLCPYLSDDDLRQWHLQKQYPKSDELMLWQRTSDEEGKNPYYDRHRCLHEKLDLTVEADRYTLGRALYHLTQRRGFLSNRLDTSADNKEDGVVKSGISQLSTEMEEAGCEYLGDYFYKLYHEQGNKVRIRQRYTDRKKHYQHEFDAICEKQELSSELIEDLQRAIFFQLPLKSQRHGVGRCTFERGKPRCADSHPDYEEFRMLCFVNNIQVKGPHDLELRPLTYEEREKIEHLFFRKSKPNFDFEDIAKELAGKKNYAWIHDKEERAYKFNYRMTQGVPGCPTTAQLKSIFGDDWKTGIAETYTLIQKKNGSKSLQEMVDDVWNVLYSFSSVEKLKEFAHHKLQLDEENAEKFAKIKLSHSFAALSLKAIRKFLPFLRKGMYYTHASFFANIPTIVGKEIWNNEQSRKYIMENVGELVFNYQPKHRDVQGTIEMLIKDFLANNFELPAGATDKLYHPSMIETYPHALRNEFGILQLGSPRTNAIRNPMAMRSLHVLRRVVNQLLKESIIDENTEVHVEYARELNDANKRRAIADRQKEQDKQHKKYGDEIRKLYKEETGKDIEPTQTDVLKFQLWEEQNHYCLYTGEQIGITDFIGSNPKFDIEHTIPQSVGGDSTQMNLTLCDNRFNREVKKAKLPTELANHEEILTRIEPWKNKYEQLVKERDKQRTFAGMDKAVKDIRIQKRHKLQMEIDYWRGKYERFTMTEVPEGFSRRQGTGIGLISRYAGLYLKSLFHQADSRNKSNVYVVKGVATAEFRKMWGLQSEYEKKCRDNHSHHCMDAITIACIGKREYDLMAEYYHMEETFRQGRGSKPKFSKPWATFTEDVLNIYKNLLVVHDTPNNMPKHTKKYVQTSKGKVLAQGDTARGSLHLDTYYGAIERDGEIRYVVRRPLSSFTNPKELENIVDETVKRTIKEAIADKNFKQAIAEPIYMNEDKGILIKKVRCFANSVKQPINIRQHRDLSKKEYKQQYHVMNENNYLLAIYEGLVKNKVVREFEIVSYIEAAKYYKRSQDRNIFSSIVPTHSTKYGLPLKTKLLMGQQVLMFEENPDEIQVDNTKDLVKRLYKVVGIEKDGRIKFKHHQEARKEGLTIYSTPYKNNDDYVPIFRQSIKNINILVDGIDFNIDILGKVTLKE

SEQ ID NO: 134 - protein, 1218 aa, Prevotella timonensis
MNKRILGLDTGTNSLGWAVVDWDEHAQSYELIKYGDVIFQEGVKIEKGIESSKAAERSGYKAIRKQYFRRRLRKIQVLKVLVKYHLCPYLSDDDLRQWHLQKQYPKSDELMLWQRTSDEEGKNPYYDRHRCLHEKLDLTVEADRYTLGRALYHLTQRRGFLSNRLDTSADNKEDGVVKSGISQLSTEMEEAGCEYLGDYFYKLYDAQGNKVRIRQRYTDRNKHYQHEFDAICEKQELSSELIEDLQRAIFFQLPLKSQRHGVGRCTFERGKPRCADSHPDYEEFRMLCFVNNIQVKGPHDLELRPLTYEEREKIEPLFFRKSKPNFDFEDIAKALAGKKNYAWIHDKEERAYKFNYRMTQGVPGCPTIAQLKSIFGDDWKTGIAETYTLIQKKNGSKSLQEMVDDVWNVLYSFSSVEKLKEFAHHKLQLDEESAEKFAKIKLSHSFAALSLKAIRKFLPFLRKGMYYTHASFFANIPTIVGKEIWNKEQNRKYIMENVGELVFNYQPKHREVQGTIEMLIKDFLANNFELPAGATDKLYHPSMIETYPNAQRNEFGILQLGSPRTNAIRNPMAMRSLHILRRVVNQLLKESIIDENTEVHVEYARELNDANKRRAIADRQKEQDKQHKKYGDEIRKLYKEETGKDIEPTQTDVLKFQLWEEQNHHCLYTGEQIGITDFIGSNPKFDIEHTIPQSVGGDSTQMNLTLCDNRFNREVKKAKLPTELANHEEILTRIEPWKNKYEQLVKERDKQRTFAGMDKAVKDIRIQKRHKLQMEIDYWRGKYERFTMTEVPEGFSRRQGTGIGLISRYAGLYLKSLFHQADSRNKSNVYVVKGVATAEFRKMWGLQSEYEKKCRDNHSHHCMDAITIACIGKREYDLMAEYYRMEETFKQGRGSKPKFSKPWATFTEDVLNIYKNLLVVHDTPNNMPKHTKKYVQTSIGKVLAQGDTARGSLHLDTYYGAIERDGEIRYVVRRPLSSFTKPEELENIVDETVKRTIKEAIADKNFKQAIAEPIYMNEEKGILIKKVRCFAKSVKQPINIRQHRDLSKKEYKQQYHVMNENNYLLAIYEGLVKNKVVREFEIVSYIEAAKYYKRSQDRNIFSSIVPTHSTKYGLPLKTKLLMGQLVLMFEENPDEIQVDNTKDLVKRLYKVVGIEKDGRIKFKYHQEARKEGLPIFSTPYKNNDDYAPIFRQSINNINILVDGIDFTIDILGKVTLKE

SEQ ID NO: 135 - protein, 1487 aa, Prevotella timonensis
MKNILGLDLGSNSVGWALVKVEENGNPIGSIKMGSRIIPMSQDILGSFEKGDTVSQTAQRTLYRGKRRLIERHVLRRERLCRVLHIMNFLPAHFDRLLGWDKTDNKTYGKFIDDSEPKLAWRQNKNEMGKMEFVFMDSFHEMLSDFAKHQPQLIANGKKVPLDWTIYYLRKKALTQLISKEELAWILLNFNKKRGYYQLRGEEEEEQPTKKEEYKVLKVISVDADEGQKGNGIWYNIHLEDGGIYKKKSDIPLYDWVGKTLQLIVVTTYEKDGKTPKIFDSGKQNPSYRLPKEDDWGLVKKRTESQLQSSGKTVGAFIYDNILSKPDDKIRGNLVRTIERKYYKKELIEILQQQAKYHDELHNQNLLESCAKELYAHNDVHYNEVIKSNMINLLVNDIIFYQRPLKSKKSLIANCKYESYEYVDKETGEIKEMPIKCIAKSNPYYQEFRLWQFIHNLRLSDVVTREDVTAQYLSTPQDYCNLFTYLNDRKEIKQDILLKDFFKIKKVQIDKEKVFPIEWNYIKDATKSYPCNETRYELLSALKRAGMDKQWLDDTPNMQYRLWHLLYSVEEKEESAKALRKLYDDDKFVTSFLKIKPFNKCYGAYSEKAIKRLLTLMRMGKAWNEQAIDAKTLKCIQQIITDNVDSKLKEKIDDSRYVLHHVSDFQGLPTYLASYVIYGRHSEVTDIQCWDSPEDLLKFIRDFKQHSLRNPIVEQVILETLRVVYDIWKAEKHIDEIHVEVAREMKLTAQQRNEANLRNLNNEATNLRIKYLLEELKNDTFIKDVRPLSPIHQEKMRIYEQAVLGNLNKQDKDYDDIIKISKKEHPTNAELIRYKLWLEQRYCSPYTGKAISLSKLFTTAYEIEHIIPQSRYFDNSFNNKVICEAEVNKAKGNMLGYEFIKKQGGQKIYCTQLGKAVTILKEEAYKQFVNEHYAHNKRKRDNLLAENIPESFSSRQLNDTRYITKTIMSLLSNVVRQQSEEEATAKNLLPSSGSVTDRLKNDWGLKDVWNTIVTPRFERLNKLSGTNDFGEMKEENGNRYFQTNVPLEYEKGFKKKRIDHRHHAMDALVIACTTRNMVNYISNANANSPKQREDLRQLLCDKNRIINKPWDTFTQDALKALNDIVVSFKNNVRIINRATNRYQRYDKNGKKIIFSQKGDDMWAIRKSMHKETVFGRVNLIRKEVLPIAKALDNISAICNAQLRAYVNDLVDKHFNKKQLVAHFKSLNYKWNRQDVSKVEVWISSDNKTPMVAVRKPLDTSFDKKKIASITDTGIQTILLNYLESKGGDASVAFAPEGIQEMNSNIELYNNGKAHKPIKNVRLSEPLGAKYQVGERGAKTKKYVEADKGTNLFFAIYEDEEGKRYYYSVPLREAIERQKQKLSPVPEYNEKGVALKFYLSPNDLVYVPTEEERTMGTCHIDKARIYKMVSSTGCSCYFVPSTFAKVIVDKVELQSLNKMEKAITDECIKEVCWKLKVDRLGNIINVIK

SEQ ID NO: 136 - protein, 1138 aa, Bifidobacterium dentium
MLCRCHRRYRIGIDVGLMSVGLAAIEVDETGFPIRILNIQSVIHDGGIDPQLGKKKSISRKAISGVARRTRRMRRRKVVRLRQLDATLESLGFPIVEPDSLDTWEIWLTRAKLASSYIQDDETRKEDVSIALRHIARHRGWRNPYSNVESLFVDVAPSEQYEELRRKAEEKLGTSLSGNPTSAEIVECILKRQVGEVQLRTRSRKGVNGNAVEKEGLLPTKLMQSDNAAEIRRIFKVQRIDDETGRKLLRAVFKACSPKGSVERRVGRDALAPGLPRALKASLAFQEYRIANVLTNLVISEDGTKRKLTIAEKQRVFGFLSSNETDDITWIDVAEKLGLERRQIQGVGCLTADGEERISSTPPRNITALHIHSAKPVIREKLVAWWKAASPTVRETMVELLSNTVDIDRVREDMDYSSAVAFIDSLGDEELTALDSVDLLSGRAAYSRQTLKQLTERMLNTDDDLHEARKAVFGVDDNWKPPVDAISTSVGNPAVDRVLKIVNRYLLACQKRWRNPQSVQIEHVRESFSSVAKAKETERVQGERARYRNDLRRELCEQEGLNKIRESDIRRWESVQRQNGTCLYCGSPITFRTCEMDHIVPRKGVGSTNTRVNLAAACAACNKLKSNTAFSVWARTEGAANRKVSQRDAIERVKTFIFNKSVPPREQRAFKQAVISRLRQAESDPAIDNRSIESVAWMADELHRRIEAYFNQDADVSGNTPATQVWVFQGRVTALARKASGIEGRIHFAGEWKKTRLDRRHHAVDAAVIAMMNHSAAQTLVERDSLRLSQWITRKPETWKNYPFSEGQKKTRFKEWLDCMNALLDLLNDALDSDRVPVTRCQRMSLGNSQAHAATIRKMKRVELFSPMDADLIRRASTPALYCALTRLPEYSPEKGLPENRGREIVLNGRHIRSTETVDFFASGAAQLMVRNGSAEIGDSIHHMRIYRYRKTGAKSQEYVYGMIRVFQIDLLHASSENLFAVQLPSQSVSVRYGDKNVVQAIQEGRAEYLGHIVPNDEILISYEGVRMKDSEKIGAYANDFSGTASELAQRRHWVVVGSDVSKLALRPSYLSEEGLENSGSESERLSKQTRKVIEGKGWVVAVNILAKYHPVVIRRNALGEPRFRTNSGMPVSWRWDR

SEQ ID NO: 137 - protein, 587 aa, Neisseria subflava
MATSRSRIRSQTDAFGVVGSLVAFNQTSRLFVAKKNEGETADKELGALLKGVADNAHALQTGNFRTPAELALNKFEKESGHIRNQRGDYSHTFNRKDLQAELNLLFEKQKEFGNPHVSDGLKEGIETLLMAQRPALSGDAVQKMLGYCTFEPTEPKAAKNTYTAGRFIWLTKLNNLRILEQGSERPLTTTERATLMDEPYRKSKLTYAQARKLLGLEDTAFFKGLRYGKDNAEASTLMEMKAYHAISRALEKEGLKDKKSPLNLSPELQDEIGTAFSLFKTDEDITGRLKDRVQPEILEALLKHISFDKFVQISLKALRRIVPLMEQGKRYDEACAEIYGDHYGKKNAEEKIYLPPIPADEIRNPVVLRALSQARKVINAVVRRYGSPARIHIETAREVGKSFKDRKEIEKRQEENRKDREKAAAKFREYFPNFVGEPKSKDILKLRLYEQQHGKCLYSGKEINLGRLNEKGYIEIDHALPFSRTWDDSFNNKVLVLGSENQNKGNQTPYEYFNGKDNSREWQEFKARVETSRFPRSKKQRILLQKFDEDGIYRIGVKTALSFPKYQIDELGKEIRPCRLKKRPPVR

SEQ ID NO: 138 - protein, 1269 aa, Mycoplasma gallisepticum
MNNSIKSKPEVTIGLDLGVGSVGWAIVDNETNIIHHLGSRLFSQAKTAEDRRSFRGVRRLIRRRKYKLKRFVNLIWKYNSYFGFKNKEDILNNYQEQQKLHNTVLNLKSEALNAKIDPKALSWILHDYLKNRGHFYEDNRDFNVYPTKELAKYFDKYGYYKGIIDSKEDNDNKLEEELTKYKFSNKHWLEEVKKVLSNQTGLPEKFKEEYESLFSYVRNYSEGPGSINSVSPYGIYHLDEKEGKVVQKYNNIWDKTIGKCNIFPDEYRAPKNSPIAMIFNEINELSTIRSYSIYLTGWFINQEFKKAYLNKLLDLLIKTNGEKPIDARQFKKLREETIAESIGKETLKDVENEEKLEKEDHKWKLKGLKLNTNGKIQYNDLSSLAKFVHKLKQHLKLDFLLEDQYATLDKINFLQSLFVYLGKHLRYSNRVDSANLKEFSDSNKLFERILQKQKDGLFKLFEQTDKDDEKILAQTHSLSTKAMLLAITRMTNLDNDEDNQKNNDKGWNFEAIKNFDQKFIDITKKNNNLSLKQNKRYLDDRFINDAILSPGVKRILREATKVFNAILKQFSEEYDVTKVVIELARELSEEKELENTKNYKKLIKKNGDKISEGLKALGISEDEIKDILKSPTKSYKFLLWLQQDHIDPYSLKEIAFDDIFTKTEKFEIDHIIPYSISFDDSSSNKLLVLAESNQAKSNQTPYEFISSGNAGIKWEDYEAYCRKFKDGDSSLLDSTQRSKKFAKMMKTDTSSKYDIGFLARNLNDTRYATIVFRDALEDYANNHLVEDKPMFKVVCINGSVTSFLRKNFDDSSYAKKDRDKNIHHAVDASIISIFSNETKTLFNQLTQFADYKLFKNTDGSWKKIDPKTGVVTEVTDENWKQIRVRNQVSEIAKVIEKYIQDSNIERKARYSRKIENKTNISLFNDTVYSAKKVGYEDQIKRKNLKTLDIHESAKENKNSKVKRQFVYRKLVNVSLLNNDKLADLFAEKEDILMYRANPWVINLAEQIFNEYTENKKIKSQNVFEKYMLDLTKEFPEKFSEFLVKSMLRNKTAIIYDDKKNIVHRIKRLKMLSSELKENKLSNVIIRSKNQSGTKLSYQDTINSLALMIMRSIDPTAKKQYIRVPLNTLNLHLGDHDFDLHNMDAYLKKPKFVKYLKANEIGDEYKPWRVLTSGTLLIHKKDKKLMYISSFQNLNDVIEIKNLIETEYKENDDSDSKKKKKANRFLMTLSTILNDYILLDAKDNFDILGLSKNRIDEILNSKLGLDKIVK

SEQ ID NO: 139 - protein, 1354 aa, Prevotella melaninogenica
MADFAKYQPGMVADGRKIPLDWTLYYLRKKALTQAIRKEELAWILLNFNQKRGYYQLRGEEEEENSTKHEEYYELKVVSVEAAEEGKGGNTWYNVTLENGWIYRRQSKIELNDWVGKVRPFIVTTEYEIDGVTIKKDKNGEVKRSFRAPSENDWGLRKKRTESLLEESGKTVGAFIYNHILSEPADKIRGNFIRTIERKFYKKELEAILREQSKHQKELKDIDTLIACIKELYPNNKPHQDSLIKKDMTYLLITDLIFYQRPLKSKKSLIADCPYEYYEYVIKETGENKRQSIKCIAKSNPYYQEFRLWQFIINLRLFDRNNDKEVTSEYLSSMEDYTRLFTYLNDRKDINQETLLKDFFKQKKVKRGMEKEFPIRWNYIEDKEKKYPCNETRHELLTALGKVGIDHSWLDDKELFYRLWHLLYSVESKEEAEGALRKLVDNDDFVNAFLKIKPFKKEYGAYSEKAIKKLLAVMRMGNLWNEVDICEQTRDRIQNIIKGDIDEKIKDRMGRTFSQLSDFQGLPEWLACYVVYGQHSEATDIQRWTKPENLMAYINGFKQHSLRNPIVEQCILETLRTVHDIWKEAGHIDEIHIELGRGMKSTADQRARMSKSIMQNENTNLRIKSLLMELKNAKEFENVRPYSPMQQEILRIYEEGALQELTKEDAQYNEISKISQMAQPSANELLKYRLWLEQKYCSPYTGKPISLSKLFTSAYQIEHIIPQSRYFDDSFTNKVICEAEVNQLKSNMLGYEFIKKHGGEIVRCTMIGDVKLLDAKEYYNFVTEHYTNNRRKKEKLLMEDIPQEFLNRQMNDSRYISKKVMAILSNIVREEDEQEAKSKFVIACSGGITDRLKQDWGLNDVWNSIVYPRFERLNKLTNTENFGRWENKKGKQVFQTSVPLELQKDFSKKRIDHRHHAMDALVIACASNNIINYLNNESAKSQEKREDLRKKLCDKNRIIRKPWETFTQDAHTALENVVVSFKNYIRVINKATNYYEKYDKNGKKEIAEQKGQDMWAIRKPMHKETVFGQVNLRRKITIKLKDALEKIPAICDKELRDYINILVAKQFNKKQILAHFKSINYRLNMKSVDKVDVWQFSNEKEPMVATRKSVDTSFDTKRIATITDTGIQKILLNYLKAKNNDPNIAFTPEGIAEMNKHITEYNNGKQHQPILKVRVSEPKGAKYQVGETGNKRSKFVEAQKGTNLYFAIYEDKEGNRSYNTIPLNEVIERLKQGLSPVPDANEKSIPLKFHLSPNDLVYVPKTDEENEIKMGQIYKFVDSSGTTANFVPHRVSNLIYNVDKKIAENFCNHEIIQNEYGIGSPQSKNQKSITGEMIKAVCWKLEVDRLGNIHKIIK

SEQ ID NO: 140 - protein, 1130 aa, Streptococcus gallolyticus
MTNGKILGLDIGIASVGVGIIEAKTGKVVHANSRLFSAANAENNAERRGFRGSRRLNRRKKHRVKRVRDLFEKYEIVTDFRNLNLNPYELRVKGLTEQLTNEELFAALRTISKRRGISYLDDAEDDSTGSTDYAKSIDENRRLLKTKTPGQIQLERLEKYGQLRGNFTVYDENGEAHRLINVFSTSDYEKEARKILETQADYNKKITAEFIDDYVEILTQKRKYYHGPGNEKSRTDYGRFRTDGTTLENIFGILIGKCSFYPDEYRASKASYTAQEYNFLNDLNNLKVPTETGKLSTEQKEALVEFAKSTATLGPAKLLKEIAKILDCKVDEIKGYREDDKGKPDLHTFEPYRKLKFNLDSVNIDDLSREVLDKLADILTLNTEREGIEDAIRHNLPNQFTEGQISEIIKVRKSQSTAFNKGWHSFSAKLMNELIPELYATSDEQMTILTRLEKFKVNKKSSKNTKTIDEKEVTDEIYNPVVAKSVRQTIKIINAAVKKYGDFDKIVIEMPRDKNADDEKKFIDKRNKENKKEKDDALKRAAYLYNGTDKLPDEVFHGNKQLETKIRLWYQQGERCLYSGKPIPIQELVHNSNNFEIDHILPLSLSFDDSLANKVLVYAWTNQEKGQKTPYQVIDSMDAAWSFREMKDYVLKQKGLGKKKRDYLLTTENIDKIEVKKKFIERNLVDTRYASRVVLNSLQSALRELGKDTKISVIRGQFTSQLRRKWKIDKSRETYHHHAVDALIIAASSQLKLWEKQDNPMFVDYGNNQVVDKQTGEILSVSDDEYKELVFQPPYQGFVNMISSKGFEDEILFSYQVDSKYNRKVSDATIYSTRKAKIGKDKKEETYVLGKIKDIYSQNGFDTFIKKYNKDKTQFLMYQKDPLTWENVIEVILRDYPTTKKSEDGKNDVKCNPFEEYRRENGLVCKYSKKGKGTPIKSLKYYDKKLGNCIDITPEGSKNEVVLQSLNPWRADVYFNPETLKYELLGLKYSDLSFEKGTGKYHISQEKYDVIKEKEGIGKKSEFKFTLYRNDLILIKDTASGEQEIYRFLSRTMPNVKHYAELKPYDKEKFDNVQELVEALGEADKVGRCIKGLNKSNLSIYKVRTDVLGNKYFVKKEGDKPKLDFKNNKK

SEQ ID NO: 141 - protein, 1371 aa, Streptococcus gallolyticus
MTEKNYSIGLDIGTNSVGWAVITDDYKVPAKKMKVLGNTDKKYIKKNLLGALLFDNGETAEATRLKRTARRRYTRRKNRLRYLQEIFAEEMAKVDESFFYRLDESFLTTDDKDFERHPIFGNKADEIKYHQEFPTIYHLRKHLADSHEKADLRLIYLALAHMIKFRGHFLIEGELNAENTDVQKLFEAFVEVYDRTFDDSNLSEITVDASSILTEKFSKSRRLENLIKHYPTEKKNTLFGNLVALALGLQPNFKTSFKLSEDAKLQFSKDTYEEDLEELIGKIGDEYADLFTSAKNLYDAILLSGILTVADNTTKAPLSASMIKRYNEHQVDLKKLKEFIKNNASDKYDEIFNDKDKNGYAGYIENGVKQDEFYKYLKTTLSKIDGSDYFLDKIEREDFLRKQRTFDNGSIPHQIHLQEMHAILRRQGEHYAFLKENQAKIEKILTFRIPYYVGPLARKNSRFAWAEYHSDEKITPWNFDEIIDKEKSAEKFITRMTLNDLYLPEEKVLPKHSLVYETYTVYNELTKVKYVNEQGKSNFFDANMKQEIFEHVFKENRKVTKDKFLNYLNKEFPEYRIQDLIGLDKENKSFNASLGTYHDLKKILDKSFLDDKTNETIIEDIIQTLTLFEDRDMIRQRLQKYSDIFTPQQLKKLERRHYTGWGRLSYKLINGIRNKENGKSILDYLIDDGYANRNFMQLISDDTLPFKQIIKDAQIIGDIDDVTSVVRELPGSPAIKKGILQSVKIVDELVKVMGHNPDNIVIEMARENQTTNRGRNQSQQRLKKLQDSLKELGSNILNEEKPSYIEGKVENNHLQDDRLFLYYIQNGKDMYTGDELDIDHLSDYDIDHIIPQAFIKDDSIDNRVLTSSAKNRGKSDDVPSLDIVHDRKADWIRLYKSGLISKRKFDNLTKAERGGLTENDKAGFIKRQLVETRQITKHVAQILDSRFNTERDENDKVIRNVKVITLKSNLVSQFRKDFKFYKVREINDYHHAHDAYLNAVVGTALLKKYPKLAPEFVYGEYKKYDIRKFITSSGDKATAKYFFYSNLMNFFKRVIRYSNGKVVVRPVIECSKDTGEIAWNKQTDFEKVRRVLSYPQVNIVKKVETQTGGFSKESILPKGNSDKLIPRKTKKFRWDTPKYGGFDSPNIAYSVFVIADVEKGKAKKLKTVKELVGISIMERSSFEENPVVFLEKKGYQNVQEDNLIKLPKYSLFEFEGGRRRLLASASELQKGNEVVLSRHLVELLYHAHRVNSFNNSEHLKYVSEHKKEFGEVLSCVENFAKSYVDVEKNLGKIRAVADKIDTFSIEDISISFVNLLTLTALGAPADFNFLGEKIPRKRYTSTKECLNATLIHQSITGLYETRIDLSKLGEE

SEQ ID NO: 142 - protein, 1168 aa, Azospirillum sp.
MARPAFRAPRREHVNGWTPDPHRISKPFFILVSWHLLSRVVIDSSSGCFPGTSRDHTDKFAEWECAVQPYRLSFDLGTNSIGWGLLNLDRQGKPREIRALGSRIFSDGRDPQDKASLAVARRLARQMRRRRDRYLTRRTRLMGALVRFGLMPADPAARKRLEVAVDPYLARERATRERLEPFEIGRALFHLNQRRGYKPVRTATKPDEEAGKVKEAVERLEAAIAAAGAPTLGAWFAWRKTRGETLRARLAGKGKEAAYPFYPARRMLEAEFDTLWAEQARHHPDLLTAEAREILRHRIFHQRPLKPPPVGRCTLYPDDGRAPRALPSAQRLRLFQELASLRVIHLDLSERPLTPAERDRIVAFVQGRPPKAGRKPGKVQKSVPFEKLRGLLELPPGTGFSLESDKRPELLGDETGARIAPAFGPGWTALPLEEQDALVELLLTEAEPERAIAALTARWALDEATAAKLAGATLPDFHGRYGRRAVAELLPVLERETRGDPDGRVRPIRLDEAVKLLRGGKDHSDFSREGALLDALPYYGAVLERHVAFGTGNPADPEEKRVGRVANPTVHIALNQLRHLVNAILARHGRPEEIVIELARDLKRSAEDRRREDKRQADNQKRNEERKRLILSLGERPTPRNLLKLRLWEEQGPVENRRCPYSGETISMRMLLSEQVDIDHILPFSVSLDDSAANKVVCLREANRIKRNRSPWEAFGHDSERWAGILARAEALPKNKRWRFAPDALEKLEGEGGLRARHLNDTRHLSRLAVEYLRCVCPKVRVSPGRLTALLRRRWGIDAILAEADGPPPEVPAETLDPSPAEKNRADHRHHALDAVVIGCIDRSMVQRVQLAAASAEREAAAREDNIRRVLEGFKEEPWDGFRAELERRARTIVVSHRPEHGIGGALHKETAYGPVDPPEEGFNLVVRKPIDGLSKDEINSVRDPRLRRALIDRLAIRRRDANDPATALAKAAEDLAAQPASRGIRRVRVLKKESNPIRVEHGGNPSGPRSGGPFHKLLLAGEVHHVDVALRADGRRWVGHWVTLFEAHGGRGADGAAAPPRLGDGERFLMRLHKGDCLKLEHKGRVRVMQVVKLEPSSNSVVVVEPHQVKTDRSKHVKISCDQLRARGARRVTVDPLGRVRVHAPGARVGIGGDAGRTAMEPAEDIS

SEQ ID NO: 143 - protein, 1345 aa, Streptococcus mutans
MKKPYSIGLDIGTNSVGWAVVTDDYKVPAKKMKVLGNTDKSHIKKNLLGALLFDSGNTAADRRLKRTARRRYTRRRNRILYLQEIFAEEMSKVDDSFFHRLEDSFLVTEDKRGERHPIFGNLEEEVKYHENFPTIYHLRQYLADNPEKVDLRLVYLALAHIIKFRGHFLIEGKFDTRNNDVQRLFQEFLAVYDNTFENSSLQEQNVQVEEILTDKISKSAKKDRVLKLFPNEKSNGRFAEFLKLIVGNQADFKKHFELEEKAPLQFSKDTYEEELEVLLAQIGDNYAELFLSAKKLYDSILLSGILTVTDVSTKAPLSASMIQRYNEHQMDLAQLKQFIRQKLSDKYNEVFSDVSKDGYAGYIDGKTNQEAFYKYLKGLLNKIEGSGYFLDKIEREDFLRKQRTFDNGSIPHQIHLQEMRAIIRRQAEFYPFLADNQDRIEKILTFRIPYYVGPLARGKSDFAWLSRKSADKITPWNFDEIVDKESSAEAFINRMTNYDLYLPNQKVLPKHSLLYEKFTVYNELTKVKYKTEQGKTAFFDANMKQEIFDGVFKVYRKVTKDKLMDFLEKEFDEFRIVDLTGLDKENKAFNASYGTYHDLRKILDKDFLDNSKNEKILEDIVLTLTLFEDREMIRKRLENYSDLLTKEQVKKLERRHYTGWGRLSAELIHGIRNKESRKTILDYLIDDGNSNRNFMQLINDDALSFKEEIAKAQVIGETDNLNQVVSDIAGSPAIKKGILQSLKIVDELVKIMGHQPENIVVEMARENQFTNQGRRNSQQRLKGLTDSIKEFGSQILKEHPVKHSQLQNDRLFLYYLQNGRDMYTGEELDIDYLSQYDIDHIIPQAFIKDNSIDNRVLTSSKENRGKSDDVPSKNVVRKMKSYWSKLLSAKLITQRKFDNLTKAERGGLTDDDKAGFIKRQLVETRQITKHVARILDERFHTETDENNKKIRQVKIVTLKSNLVSNFRKEFELYKVREINDYHHAHDAYLNAVIGKALLGVYPQLEPEFVYGDYPHFHGHKENKATAKKFFYSNIMNFFKKDDVRTDKNGEIIWKKDEHISNIKKVLSYPQVNIVKKVEEQTGGFSKESILPKGNSDKLIPRKTKKFYWDTKKYGGFDSPIVAYSILVIADIEKGKSKKLKTVKALVGVTIMEKMTFERDPVAFLERKGYRNVQEENIIKLPKYSLFKLENGRKRLLASARELQKGNEIVLPNHLGTLLYHAKNIHKVDEPKHLDYVDKHKDEFKELLDVVSNFSKKYTLAEGNLEKIKELYAQNNGEDLKELASSFINLLTFTAIGAPATFKFFDKNIDRKRYTSTTEILNATLIHQSITGLYETRIDLSKLGGD

SEQ ID NO: 144 - protein, 1024 aa, Helicobacter mustelae
MIRTLGIDIGIASIGWAVIEGEYTDKGLENKEIVASGVRVFTKAENPKNKESLALPRTLARSARRRNARKKGRIQQVKHYLSKALGLDLECFVQGEKLATLFQTSKDFLSPWELRERALYRVLDKEELARVILHIAKRRGYDDITYGVEDNDSGKIKKAIAENSKRIKEEQCKTIGEMMYKLYFQKSLNVRNKKESYNRCVGRSELREELKTIFQIQQELKSPWVNEELIYKLLGNPDAQSKQEREGLIFYQRPLKGFGDKIGKCSHIKKGENSPYRACKHAPSAEEFVALTKSINFLKNLTNRHGLCFSQEDMCVYLGKILQEAQKNEKGLTYSKLKLLLDLPSDFEFLGLDYSGKNPEKAVFLSLPSTFKLNKITQDRKTQDKIANILGANKDWEAILKELESLQLSKEQIQTIKDAKLNFSKHINLSLEALYHLLPLMREGKRYDEGVEILQERGIFSKPQPKNRQLLPPLSELAKEESYFDIPNPVLRRALSEFRKVVNALLEKYGGFHYFHIELTRDVCKAKSARMQLEKINKKNKSENDAASQLLEVLGLPNTYNNRLKCKLWKQQEEYCLYSGEKITIDHLKDQRALQIDHAFPLSRSLDDSQSNKVLCLTSSNQEKSNKTPYEWLGSDEKKWDMYVGRVYSSNFSPSKKRKLTQKNFKERNEEDFLARNLVDTGYIGRVTKEYIKHSLSFLPLPDGKKEHIRIISGSMTSTMRSFWGVQEKNRDHHLHHAQDAIIIACIEPSMIQKYTTYLKDKETHRLKSHQKAQILREGDHKLSLRWPMSNFKDKIQESIQNIIPSHHVSHKVTGELHQETVRTKEFYYQAFGGEEGVKKALKFGKIREINQGIVDNGAMVRVDIFKSKDKGKFYAVPIYTYDFAIGKLPNKAIVQGKKNGIIKDWLEMDENYEFCFSLFKNDCIKIQTKEMQEAVLAIYKSTNSAKATIELEHLSKYALKNEDEEKMFTDTDKEKNKTMTRESCGIQGLKVFQKVKLSVLGEVLEHKPRNRQNIALKTTPKHV

SEQ ID NO: 145 - protein, 765 aa, Butyrivibrio fibrisolvens
MGITIGLDLGVASVGWAVVNDDYEILESCSNIFPSADASKNSERRGFRQGRRLTRRRKNRIHDFQKLWEDKGFVIPSQGTEDVLAIKIKGLSEKLSVDEVYWVLLNSLKHRGISYLDDADSGDNSSDYAKSISRNEEELKEKLPCEIQWERLQKYGAYRGNISIVEDGEPITLRNVFTTSAYKKEVEQFIDTQAKYNAQYSGDFKADYLEIFNRKREYYEGPGNELSRTDYGKYTTEINADGEYITVDNIFDKLVGKCSVNPDERRAAGASYTAQEFNVLNDLNNLTISSESSFIEDGKLTEDAKRKIIETIKNAKTVNVKKIICDVIGDKKCQISGARIDKNEKEIFHSFEAYNKMRRALEEIGFDISSLSRENLDLIGDILTLNTDRESILNAFNRKGIELADEAKDILVKVRKTNGSLFNKWQSFGLSIMNELIPELYAQPKNQMELLTAMGVFKSRGDRFLECKEIPGDLIVDDIYNPVVSKTVRITVRILNALIKKYGYPDRVVIEMPRDKNSDEEQQRLKKEQRDNENEIKDIKARVKTEYGREITEEDFRQHSKLSLKLKLWNEQQGICPYSGKSIKIDDLLDNPNLFEVDHIIPLSISFDDSRNNKVLVYSSENQDKGNRTPLAYLASVNRQWDIHSFMDYVLKTYAGAQKRKKRDNLLNEQDITKVEVLQGFVNRNINDTRYASKVVLNSLQEYFSSKECSTKVKVIRGSFTHQMRVNLKLKKTVMNHMFIMQLMQCLLLFHRWDMTLIMNLQISI

SEQ ID NO: 146 - protein, 1338 aa, Coprococcus catus
MKQEYFLGLDMGTGSLGWAVTDSTYQVMRKHGKALWGTRLFESASTAEERRMFRTARRRLDRRNWRIQVLQEIFSEEISKVDPGFFLRMKESKYYPEDKRDAEGNCPELPYALFVDDNYTDKNYHKDYPTIYHLRKMLMETTEIPDIRLVYLVLHHMMKHRGHFLLSGDISQIKEFKSTFEQLIQNIQDEELEWHISLDDAAIQFVEHVLKDRNLTRSTKKSRLIKQLNAKSACEKAILNLLSGGTVKLSDIFNNKELDESERPKVSFADSGYDDYIGIVEAELAEQYYIIASAKAVYDWSVLVEILGNSVSISEAKIKVYQKHQADLKTLKKIVRQYMTKEDYKRVFVDTEEKLNNYSAYIGMTKKNGKKVDLKSKQCTQADFYDFLKKNVIKVIDHKEITQEIESEIEKENFLPKQVTKDNGVIPYQVHDYELKKILDNLGTRMPFIKENAEKIQQLFEFRIPYYVGPLNRVDDGKDGKFTWSVRKSDARIYPWNFTEVIDVEASAEKFIRRMTNKCTYLVGEDVLPKDSLVYSKFMVLNELNNLRLNGEKISVELKQRIYEELFCKYRKVTRKKLERYLVIEGIAKKGVEITGIDGDFKASLTAYHDFKERLTDVQLSQRAKEAIVLNVVLFGDDKKLLKQRLSKMYPNLTTGQLKGICSLSYQGWGRLSKTFLEEITVPAPGTGEVWNIMTALWQTNDNLMQLLSRNYGFTNEVEEFNTLKKETDLSYKTVDELYVSPAVKRQIWQTLKVVKEIQKVMGNAPKRVFVEMAREKQEGKRSDSRKKQLVELYRACKNEERDWITELNAQSDQQLRSDKLFLYYIQKGRCMYSGETIQLDELWDNTKYDIDHIYPQSKTMDDSLNNRVLVKKNYNAIKSDTYPLSLDIQKKMMSFWKMLQQQGFITKEKYVRLVRSDELSADELAGFIERQIVETRQSTKAVATILKEALPDTEIVYVKAGNVSNFRQTYELLKVREMNDLHHAKDAYLNIVVGNAYFVKFTKNAAWFIRNNPGRSYNLKRMFEFDIERSGEIAWKAGNKGSIVTVKKVMQKNNILVTRKAYEVKGGLFDQQIMKKGKGQVPIKGNDERLADIEKYGGYNKAAGTYFMLVKSLDKKGKEIRTIEFVPLYLKNQIEINHESAIQYLAQERGLNSPEILLSKIKIDTLFKVDGFKMWLSGRTGNQLIFKGANQLILSHQEAAILKGVVKYVNRKNENKDAKLSERDGMTEEKLLQLYDTFLDKLSNTVYSIRLSAQIKTLTEKRAKFIGLSNEDQCIVLNEILHMFQCQSGSANLKLIGGPGSAGILVMNNNITACKQISVINQSPTGIYEKEIDLIKL

SEQ ID NO: 147 - protein, 1035 aa, Candidatus Puniceispirillum
MRRLGLDLGTNSIGWCLLDLGDDGEPVSIFRTGARIFSDGRDPKSLGSLKATRREARLTRRRRDRFIQRQKNLINALVKYGLMPADEIQRQALAYKDPYPIRKKALDEAIDPYEMGRAIFHINQRRGFKSNRKSADNEAGVVKQSIADLEMKLGEAGARTIGEFLADRQATNDTVRARRLSGTNALYEFYPDRYMLEQEFDTLWAKQAAFNPSLYIEAARERLKEIVFFQRKLKPQEVGRCIFLSDEDRISKALPSFQRFRIYQELSNLAWIDHDGVAHRITASLALRDHLFDELEHKKKLTFKAMRAILRKQGVVDYPVGFNLESDNRDHLIGNLTSCIMRDAKKMIGSAWDRLDEEEQDSFILMLQDDQKGDDEVRSILTQQYGLSDDVAEDCLDVRLPDGHGSLSKKAIDRILPVLRDQGLIYYDAVKEAGLGEANLYDPYAALSDKLDYYGKALAGHVMGASGKFEDSDEKRYGTISNPTVHIALNQVRAVVNELIRLHGKPDEVVIEIGRDLPMGADGKRELERFQKEGRAKNERARDELKKLGHIDSRESRQKFQLWEQLAKEPVDRCCPFTGKMMSISDLFSDKVEIEHLLPFSLTLDDSMANKTVCFRQANRDKGNRAPFDAFGNSPAGYDWQEILGRSQNLPYAKRWRFLPDAMKRFEADGGFLERQLNDTRYISRYTTEYISTIIPKNKIWVVTGRLTSLLRGFWGLNSILRGHNTDDGTPAKKSRDDHRHHAIDAIVVGMTSRGLLQKVSKAARRSEDLDLTRLFEGRIDPWDGFRDEVKKHIDAIIVSHRPRKKSQGALHNDTAYGIVEHAENGASTVVHRVPITSLGKQSDIEKVRDPLIKSALLNETAGLSGKSFENAVQKWCADNSIKSLRIVETVSIIPITDKEGVAYKGYKGDGNAYMDIYQDPTSSKWKGEIVSRFDANQKGFIPSWQSQFPTARLIMRLRINDLLKLQDGEIEEIYRVQRLSGSKILMAPHTEANVDARDRDKNDTFKLTSKSPGKLQSASARKVHISPTGLIREG

SEQ ID NO: 148 - protein, 1270 aa, Mycoplasma gallisepticum
MNNSIKSKPEVTIGLDLGVGSVGWAIVDNETNIIHHLGSRLFSQAKTAEDRRSFRGVRRLIRRRKYKLKRFVNLIWKYNSYFGFKNKEDILNNYQEQQKLHNTVLNLKLEALNAKIDPKALSWILHDYLKNRGHFYEDNRDFNVYPTEELANYFDEFGYYKGIIDSKNDDDDKLEEGLTKYKFSNQHWLEEVKKVLSNQTGLPEKFKEEYESLFSYVRNYSEGPGSINSVSPYGIYHLDEKEGKVVQKYNNIWDKTIGKCSIFPDEYRAPKNSPIAMIFNEINELSTIRSYSIYLTGWFINQEFKKAYLNKLLDLLIKTNSEKPIDARQFKKLREETIAESIGKETLKDVESEEKLEKDDHKWKLKGLKLNTNGKIQYNDLSSLAKFVHKLKQHLKLDFLLEDQYTPLDKINFLQSLYVYLGKHLRYSNRVDSANLKEFSDSSRLFERVLQEQKDGLFKLFEQTDKDDEKILTQTHSLSTKAMLLAITRMTNLDNDEDNQKNNDKGWNFEAIKNFDQKFIDITKTNNNLSLKQDKRYLDDQFINDAILSPGVKRILREATKVFNAILKQFSEEYDVTKVVIELARELSEEKELENTKNYKKLIKKNGDKISEGLKALGIAEDKIEEILKSPTKSYKVLLWLQQDHIDPYSQKEIAFDDILTKTEKTEIDHIIPYSISFDDSSSNKLLVLAESNQAKSNQTPYEFINSGKAEITWEVYEAYCHKFKNGDSSLLDSTQRSKKFAKMMKTDTSSKYDIGFLARNLNDTRYATIVFRDALKDYANNHLVEDKPMFKVVCINGGVTSFLRKNFDPKSWYAKKDRDKNIHHAVDASIISIFSNETKTLFNQLTKFADYKLFKNTDGSWKKIDPKTGVVSEVTDENWKQIRVRNQVSEIAKVIDKYIQDSNIERKARYSRKIENKTNISLFNDTVYSAKKVGYEDQIKRKNLKTLDIHESAEENKNSKVKKQFVYRKLVNVSLLNNDKLADLFAEKEDILMYRANPWVINLAEQIFNEYTENKKIKSQNVFEKYMLDLTKEFPEKFSEAFVKSMIRNKTAIIYNVEKDVVHRIKRLKILSSELKENKWSNVIIRSKNESGTKLSYQDTINSIALMIMRSIDPTAKKQYIRVPLNTLNLHLGDQDFDLHNIDAYLKKPKFVKYLKANEIGDEYKPWRVLTSGTLLIHKKDKKLMYISSFQNLNDLIEIKNLIETEYKENVDSDPKKKKKASQILRSLSVILNDYILLDAKYNFDILGLSKNKIDEILNSKLDLDKIAK

SEQ ID NO: 149 - protein, 1204 aa, Prevotella ruminicola
MERILGIDTGTNSLGWAIVDKDENQYHLVAKGTNIFSEGVKIEKGIESSKAAERTEHRSVRKHYWRRKIRKIRLLTILSDNDLCPRLKHEQLRQWRLKKVYPTDDTFMEWQRTEDKAQVNPYKFRYICLTQKLDLSDITQRFILGRALYHLNQRRGFLSNRKEATKESEGTVKEGISSLSKDMKDSGCEYLGEYFYQLYQQGKKIRNHYTARKEHYLKEFKAICSKQELDDALIEKLEKAIFDQRPLKSQKGQVGTCTFEKGKSRCPSSHPLYEDFRMYSFINNIKVQVDTLYDKGERSLTDEEKQLIIPLFKRKSKRTFPFEDIAKKIAGKNNYCYIKSNEEKAYKFNYQMDTQVSGSPVNAQLEEIFGEDWLSSVCEVYTLANNKSRFQIMNDVWHVLFFYDDEDKLKEFAKDRLQLDDELAEKFSKISIPNDYAALSLKAIRKIMPYLRDYGLIYSEAVFLANLVDVLPQHVWGIKEMREAAIENVIDVMHSYDKNNIDGITLEGCVKTFLKERYQVSDDNLKKLYHPSMLDPYPRQRPNDEGVFQLGSPRISSVKNPMAMHSLFRLRKVVNLMLKKGYITPDTKVHIEFSRDLNDANKRWAIQTWQRENEKERERCRKEIEKYIASPSDTDILKYQLWEEQNHKCLYTGDEIRITDFLGDNPKYDIEHTIPRSAGGDSTKMNLTLCSSRFNRDEKKTKLPAELVNHDEILERISNWKEKYEDIDKQIRKISTKGATSKEDKDSKIRRRHYLILQRDYWRGKYQRFTMTEVPEGFSRRQGTDISVISRYARMYLKSVFKQVYIVKGIATSDFRKMWGIQDEYAKKERVNHVHHCIDAITIACIGKAEYDKLADYRHQYDDYLFQGKTKPTFDKPWPSFVIDIKHIQDELLIAHYAKDNLEKFTKKNLRGKDGRIIRDKFGNKLQMKGDTSRNSLHNDKFYGAINHEGEIKYVYRTNIEALDAKSIGNIVDPTVRSIIESAIAIHGSLKAAINKGIWMNEEKHIPIKKVRVFRNDVKKPIELKDQRDLSDKDYKQHYYVTNDGNYMMLIFSKLNNKGREIRQHVVINSLEATEVIKSHKRSQVGKVVWESYYSKEGFDLIYKLKSGTMILLYENNRDEVWDLDIRNLQKRLYIITKMKYDGRIYMMHHQEAREKKDLEEKSGSFKINEDYRPLIVNSYNQFNALVQDLDFEINDLGEIRRLI

SEQ ID NO: 150 - protein, 1178 aa, Scardovia inopinata
MGKRHNSNMAKKKISYRIGIDVGLNSTGLAAIEVDDDGAPIRILNTMSVIHDGGVDPDAAKVRGTRLAISGIARRTRRMRRRRAKRLDRLEQILEKYGYTDTEPVLEEPYGPWICRAELADGFINDDEQRRMMIGIAIRHIARHRGWRNPYQNVRALLNIDDSDLSEEYKNLKEKVQDQINDGKDLPNFTPSQLVRDYLDNFSGQPAARIRTGKAGPRGNRRDAVGILPQRMRQSDYAYELQRIFDMQKIGRDEAQELLMAVFEAKSPKGSAEKRIGKDPLTGKKRALKASLAFQKYRIVATITNLRIKTGTGSERMLSPTELNDIYTYLLRVQDDNHLPTWEDICEEVLHIGRYQLAGIGKTFEGGERISNMPPVIQTSLAIHGLSEGTLAEKLTKWWDKADDDSRESMIKLLSNTVDIDRVNEVDENFASALDFIDSLDDEELTKLDKIALPRGRAAYSEEALNKLTADMLNTGDDLFSARQRIYHVNNSWRPPQPPIGEPLGNPAVDRVLKITNRYLMNCLNRWGQPRRVTIEHTRSGFTSVKQATEHQKISDKRAEYRRDIVKQLEEAGVESVHEYDIRRWEAVQRQNGQCLYCGRDITFKTCEMDHIVPRKGPGSTNTRTNFAAVCPECNRMKSNIPFASWAETKEAKDRGVSLDKAIKQVRFFNFTKNEYSPQAQRNFKKSMIERLKQKTSDEPLDNRSIESVSWMADELYKRIDWYFNHEQYETSKKAINDDKDNLSGTQVVVYPGSITAEARNAAGLGGNIHFIGGRYKTRLDRRHHAVDACVIAMMEPGIARILTERNQLRQAQRLTARIEDDEVNWKDYPTENTAGYNKYQAWSDRMHALLEYMNNALDYDKIPVVRWERLQLGNRSAHEDTIHPLKKLPLSHEISAIDINHASTPALYEALVSLPDFSEQDGLPADPSRQINVNGERYSGDDLVSFFNSNAAQIAIQGGSAELGTAFHHARIYRCWTVGKNGKKKIFFGMIRVYQHDLLHAKNEDLFTYPLKRSSVSMRYAKKEVVHAILSGNAEYVGYLCVGDELVLDLKGDKSNDEGGSRLSGQVGEFVQKFEEDSKVNSQIVNRWTVDGFPDEAKLRLRPSMFAGEGLKNMKSELVENAAIKNILSKTGWRVSVDVISKKSPVVLRRNAFGEPRWKTNAGLPVSYRWQDTETKE

SEQ ID NO: 151 - protein, 1371 aa, Gordonibacter pamelaeae
MNLRNVESYQVGLDIGTGSVGWAVLDDNGDLCRFKGKPTWGSRVFPTAETAAEARVHRGQRRRYDRRRQRIDLLQRFFADEVAKVDPEFFIRLNQARLHPENRDPAHADYRWPLFNGSNFTEKDYYRQFPTIYHLRAHLLKSDEPADIRLVYLALHNIVKHRGNFLHQDNPSLSARNANVGDAVEALCLALDEWCGAHDVECACDEAALAEALGDASLRPGEKRERAEAALGVEKAHKKLAKAVSSAVVGYAAEFGHVFFAESEGSKFALSNDEKVEAYVCPDEGRDLFDAMRAVHSSYVLMGILSEAQGELLSVCKVGEYERYKRDLETLKSLVRAYGPERYDEFFCGPFYEGTRDYDPGKAQGYTKYNLGASKLSHEDFLKEVQKLLKDIGAQADERYADIERAIEAGAFLRRLKTSDNGTIPYQLHLEEMDAIIERQAAFYPFLAQEKDKLKSLVSFRIPYYVGPLTQKNAARDGKGEARFAWSSRKPGMEDARVYPWNWEDVIDKDQSAEDFIRRMTGTCTYLKGEPVLARCSLDYELFCVLNELAGARWTQDGDKSYRFDAADRLGIVEDLFKKRKRVTYEAAEKWLARTHGPESGKSAGGAYHVSGGQGEDAFESQLSSHYDFCKILGVDELSDADEAMAEDIILWNTVFEDRSILKRKIKLAYGDRLGDAQVRKLCQKRYTGWGRLSGELLRGLRSATDNGPKTIMDILLEGDPNHARRMGAAMNLMEILHDDLLEFQAKIDEHNRERALAVGGMSVDEVTGSPALRRGINQALRVVDEIAGIAGKPPAHIYVEVTRDEGARNKGRRTTSRYRALEAALSSIKAQCADVYAELKERDPRALDDERLTLYFMQCGKCMYSGDALDINKLQTYQVDHILPQSYVKDDSFENKVLVRPDTNQRKGDTLLLDERLIARMRGFWRTLRDAELIGEKKFNNLTRTSVSDEQMKKFVSRQLVETGQMVKQVQQLLQARYPESEVQPVKAGVSHQLRVGCALAKSREINDFHHAHDAYLACQVGRFVQYRHSAVYSEPVKMAAVVKQFIKKQAEDYRRTRELPGSDGFIVSSFMTPGFDVKTGEVFRDAWDAGAEIDRIRRCFDYKDCFISRMPEETHGAFWDATIYSPRAAGKTLSLPLKRGLDPRKYGSYSREQFAYFFVYEAVKPKKKQRVLEFAPVPVRVASALANDPDALEDYARELAEAEGLVFERIRRRKVYKYQQIIVGDSRLYVTGREEVRNARQLAFSQDETKLICRIEQGEECEEGELLDLFRSMQRKYLACAPRLARLMKVAEMEEGFIAATASGKREVLLSLTSIAAAHRNSIDLKPIGRKGSSGQMKITFSKELSTNGILFVDSSVTGMFERRCRLGL

SEQ ID NO: 152 - protein, 1388 aa, Zunongwangia profunda
MKRILGLDLGTNSIGWALVNEAENEKEISKIIKLGVRVNPLTIDEKTNFEKGRPLSTNADRTLKRGARRNLQRYKLRRENLIEILIDNHIITKETPLTEIGKGTTYQTLSLRAKAVRERIDLEDFAKVLLAINKKRGYKSSRKASNDEEGQAIDGMAIAKELYERGITPGQYVLELLENDRKYIPDFYRSDLKQEFNKIWNNQKTFYPEILTDELFKELDGKNKSQTWAICQKPFNIKGIKRITKGREKTIENYHWRVKGLSGKLNLEKLAIILQEINNDINQSSGYLGGISDKSKKLYLNKETVGEFLYKQIAKNPHTSLKNQVFYRHDYLDEFEQIWKTQSNFNANLTDELKQEIRDVIIFYQRKIKSQKSLISFCQFESWEQEYFDKETGKTKTRTVGRRVIPKSSPLFQEFKIWQNLNHLVFTNSETDEKIEIKEVEQEIRKELFEELNLRGDLNPNDLLKILRSQFKIGKLSNWKCNFEKIEGNRTNAALFNIYQKISDFEGYGIDWNKSNAKKIRKELKATFPEIGIDASILEFDAYKKQLTNQSSYELWHLLYSAEEDFKISEQDKLIYGNSSVSLKKKLHLKFGFNPEYAKMLANLSLMSDYGNLSAKAIKKILPYLEDGHLYSEACRLAGYNHSKSLTAEELEKFEPKAKLDLLKKNSLRNPVVEKILNQMVNVVNQVIDTYGKPDGVRIELARELKKSAKERAEMTKGIADGTRRNEEIKKIITQKFGIPNPTKSDLVRYRLWQELESRGYKDIFTDKYISPDKIFSSEIDIEHIIPKALLFDDSFSNKTLSFRNVNLKKANRTALDFITQDYQSNVEAYKERVETWNKDNHISKGKRNKLLMSLKDIPDGFIERDLRNSQYIARKAKRMLYEVFPNEVLATSGSITDKLRSDWDLINVMKELNLPKYKALGLTEYEERLDKGTEELFKHEVIKDWTKRNDHRHHAMDALAVAFTTHNHIQYINNLNARKDITQDNHPIIKNIENLITEVNSKGKRVFKAPMSSFRESAKEQIEAILVSFKNKNKVVTKNINQTKKEGGFNYQNAKTPRGQLHKETIYGKSKQPLEKPVKINNRFCKKQVGLIINFKEQEAVLHHLKKYDNNEKIAFSNKTLKSDPIQVNGSPLREVKIFEEIFTIRKDINPDNFKTQKHLDKIIDKGIKEVMKKRLEEYNGDFKTAFSDLDKNPIWLNQSKGITIKRATISGVTNAEPLHQAKDHLGNIILDDNGKEIPIDYVSTGNNHHVAIYQDESGNLQEEVVSFYEAVIRKNQDQPIIKKRHPKGWKFLFTMKQNEMFVFSSENFNPSEIDLLDEKNAAIISPNLFRVQKIATKNYMFRHHLETEVTNNLDFTYRHFQATEWLRNLCKVRIDHIGRIVQIGEY

SEQ ID NO: 153 - protein, 1082 aa, Methylosinus trichosporium
MRVLGLDAGIASLGWALIEIEESNRGELSQGTIIGAGTWMFDAPEEKTQAGAKLKSEQRRTFRGQRRVVRRRRQRMNEVRRILHSHGLLPSSDRDALKQPGLDPWRIRAEALDRLLGPVELAVALGHIARHRGFKSNSKGAKTNDPADDTSKMKRAVNETREKLARFGSAAKMLVEDESFVLRQTPTKNGASEIVRRFRNREGDYSRSLLRDDLAAEMRALFTAQARFQSAIATADLQTAFTKAAFFQRPLQDSEKLVGPCPFEVDEKRAPKRGYSFELFRFLSRLNHVTLRDGKQERTLTRDELALAAADFGAAAKVSFTALRKKLKLPETTVFVGVKADEESKLDVVARSGKAAEGTARLRSVIVDALGELAWGALLCSPEKLDKIAEVISFRSDIGRISEGLAQAGCNAPLVDALTAAASDGRFDPFTGAGHISSKAARNILSGLRQGMTYDKACCAADYDHTASRERGAFDVGGHGREALKRILQEERISRELVGSPTARKALIESIKQVKAIVERYGVPDRIHVELARDVGKSIEEREEITRGIEKRNRQKDKLRGLFEKEVGRPPQDGARGKEELLRFELWSEQMGRCLYTDDYISPSQLVATDDAVQVDHILPWSRFADDSYANKTLCMAKANQDKKGRTPYEWFKAEKTDTEWDAFIVRVEALADMKGFKKRNYKLRNAEEAAAKFRNRNLNDTRWACRLLAEALKQLYPKGEKDKDGKERRRVFSRPGALTDRLRRAWGLQWMKKSTKGDRIPDDRHHALDAIVIAATTESLLQRATREVQEIEDKGLHYDLVKNVTPPWPGFREQAVEAVEKVFVARAERRRARGKAHDATIRHIAVREGEQRVYERRKVAELKLADLDRVKDAERNARLIEKLRNWIEAGSPKDDPPLSPKGDPIFKVRLVTKSKVNIALDTGNPKRPGTVDRGEMARVDVFRKASKKGKYEYYLVPIYPHDIATMKTPPIRAVQAYKPEDEWPEMDSSYEFCWSLVPMTYLQVISSKGEIFEGYYRGMNRSVGAIQLSAHSNSSDVVQGIGARTLTEFKKFNVDRFGRKHEVERELRTWRGETWRGKAYI

SEQ ID NO: 154 - protein, 1186 aa, Gardnerella vaginalis
MEGNISYAIGIDVGLNSVGLAAIRLDNNGEPIRILKAMSVIHDAGIDPNGAKESDTRKAISGVARRVRRLYRQRRRRLQKLDFLLHSLGFPVVENKDLDFSDSFTPWIFRAKLADEYIADEKQRKQMLSVAIRHIARHRGWRNPYQSIKSMTQETEYSEFYNELLKNIEKFAPGVSCEGSTPAQLVRDYLLSQQGKASRRLRITTDDRRKNHPNSLDPVLPRKLMQSDNMLEILNIFNVQHIDNKYVREQIINAVFYAKSPRGSAENRVGKDAITGKGKRALKASLAFQKYRIISTISNLRIRENSKERCLTIEEKQSVYKLLTTSTDEYSKEKSAEAPLYTWIDVADCLGIERYKLRGVGSQIEDGESVGNRPPMLNSELAILYANAKSLKQSLITWWLAANRTQEDKEAFIEILSNTVDIEAIHDNPEYQDKYGSVIAFIDSMDETEIAALENISLPNGRAAYSLETLDKLNKQMLETDDDLFEARKKLFNLPNNWRPSEAPIAEPTGNPSVDRVLKIVHRFLISAKNRWGNPERINIEHVRSGFQSKKMANSYKKLLDKRTEGKENLKAMMRNSLHLGTSDSISDADIRRYEAVQRQNGQCLYCGSEITYHTCELDHIVPRKGPGSTNTRENLVATCSSCNAQKCNTPFATWCEESTYCKNHDISVDSAINRVRAFIFPPNSYDKRGASQFKKEVIARLKQKVGDEAFDNRSIESVAWMANELHRRIDWYYNSQNYQTNNGISDITNKAQTNVGVYAGSLTAIARRMSGIDGKLEFFDGRRKTRFDRRHHAVDASVIAMMTPGIAQILAIKCNLRETQLLQGNKVVPGGIDWKEYPTANDQGYQQYANWSVRMNALLELLNEEMRADRIAVVNSIRLRYSNSSVHKDDVHALLKLHVGDEIDSETIRRASTPALYCALTRNPDYDVNNGLPENTDRTILLHDKKLNADDSITFFKSKAAQLFVREGSVEIGNSIHHLRIYEYFEKLKSGKVKKSYGMIRVFQDDLHRYIHEDLFSCDLPEQSISMRYADTKVAHAVQTGNANYLGYLVPGDEIIVDFSHVKLSGYIGEFVEFLNKIGANCAAYKHWVVAGTDDKTTLILKPSMISSEGIDKLYSNCERNNFDYASYEKSIDKILVDKGWRVSVNVLDQYKAATIRRNALGEPRWASRSHLPISWSWDTGENRE

SEQ ID NO: 155 - protein, 1434 aa, Bacteroidetes oral
MKNILGLDLGTNSIGWAYVKQAQNDSEKSEIAELGVRVNPLTVDEKTNFEKGKPISTNADRTLKRGARRNLQRYKLRRQELIELLKDYQVISDKTILAEDGKETTFETLRLRVKSAKEQVSLEELARILLMINKKRGYKSSRKAKNEDEGQLIDGMEIARRLYDENLTTGQLSLQLLKEGKKSLPDYYRSDLQHELDKVWNFQKQFHPDILTDEFYTSIQGKGQKATRESFSSKYGIDTAENKGSREEKKLQAYQWRADATHKELTKEELAFVITEINNNINNSSGYLGAISDRSKELIFANETVGEYLWKQIQNDPHTSLKNQVFYRQDYFDEFERIWETQSGFYPQILTESLKNELRDILIFYQRKLKSQKALVSICEFESKEIPLKDKQGNPISKNGIPVTKLVGPKVAPKSSPLFQEFKIWQNLNNVLVRPKGSRKRKVTTNQQSTLLEGQEPVFELNLEQKELLFEELNLKGNLKTDYCLELIGYSAKEWEMNYPTLEGNKTNKALYEAYLKIIDSEGYDAKKLLKVKTDKDDINLDDIKVSASEIKTMISDIFNELGINTKILDFDAELERKQFEAQASYRLWHLLYSYEGDDSKSGNELLYRLLEDKFGFKREHSKTLANVSLLSDYGNLSTKAIRTIYPYIKENKFSTACELAGYRHSKLSISKEENENRTLKDTLDVLKKNSLRQPVVEKILNQMINLINELIEKHSEKDEKGNIVKYFKFDEIHIELARELKKNAEERRELDSKVREGKDRNEKIITILKSEFGLPYPTKNDITRYRLYEELKDNGYKDLYTNTYIPREKLFSKEIDIEHIIPKSRLFNDSFSNKTICYRQDNLNKGERTAYDYIEGLGKTQLDEYLNRVENLYTNKFITKAKYRNLLKKESEIGDGFIERDLRETQYIAKKAKEMLLQITRHVVSTTGSITDRLRDDWELVNVMRELNLPKYKVLGLTEIQERKNGQTVEVITDWTKRNDHRHHAMDALTVAFTKHSHIQYLNFLNARKDEKHKEYSNIMGIQQLETEKTTDKDGKDRRVFKTPIPNFRQVAKEHLESILISHKTKNKVVTRATNKIAGSKKQQETLSPRGQLHKETVYGKYRRYVQKEEKIGSKFDLQTIERVANPLYKRLLTKRLEENGGDPKKAFTGKNALAKSPIYLDETQTQQLPEKVKLVWLETDFSIRKDITPDNFKDEKSIDKVLDEGIKRILKDRLKSFDGDAKRAFTDLEQNPIWLNKEKGIAIKRVTISGVSNAEPLHTKKDHLGNEIFDDTGKPIPVDYVSTGNNHHIAIYRDENGNLQEKAVSFFEAVTRANQGLPTVDKTYNQHLGWQFLFTMKQNEMFVFPNKETGFDPQEIDLLDPKNKKLISPNLFRVQKISTKNYFFRHHLETSVETHNALNGVTYKSQLGLNGITDIIKVRINHLGDIVHIGEY

SEQ ID NO: 156 - protein, 1341 aa, Peptoniphilus sp.
MWGSRLFEEASTAQDRREHRSNRRRLERRKYRLDLLEELFVEEINKIDPEFFIRLRESKFHFEDRSLKNTFILFNDKMEGGYNDKVFFSKYPTIYHLRSALINGNKEDVRAVFLAIHNILKNRGHFLLAGNDINISLSLNDTLTDLFEYLKIHLGIEVEFENKLKDIEKIALDKNLSKSDKQKKIVQLLETDYKKQLADVFKLSLGLTANMENIFGKENEQGLEFINAENKIKKIQFDSSYEENIAEFDQFYGEYFEIIDICKKIYDAISLSQILVDGKGLSESKVLSYEKHKEDLKLLKKVLKNIDKAYDNKGEDRLVYKVLKEDKDKGTNYVNYSKLSNNGTATTKEEFYKFLSKNLDLKKFGKLNKEDIETLDYINSEILLGRFLPLQKEKINGVIPYQLQMKELTQILNNASKYLPFLNKIEDGMTVKDKIISLIKFRIPYYVGPLNEYNRIENGNGFAWIEKKKNEKIFPWNFNDVVDIEKSAEKFINNLTNKCTYIKEETVLPKNSIIYSKFMVLNELNNLQYGNKKLDIELKMKMYTDLFLEKKDNRKVTEKRILEYFRINGINDGKEKLTGLNNEIHADMKSYRDMCEIMGENFNINVAENIINWITVFHGEKKILINKIKNVYGKMFNDEQISKLSKLNYSDWGRLSKKLLTDIKCYIDADGINFPVSILEAMEVSNKNLMELLSNKYEFISCIDDINNKYFGDRDISASELIDELYVSPAVKRGIWQSVRILEEIVSIIGHNPKKIFIEMTRHNEEKVQKSSRRHNLEELYKAIRKDPEYVELIKEFDSTTDTDSFKIKKLYLYFMQLGKCAYSKEKIDFDKLFTDSYDIDHIYPRSKTKDDSIHNNLVLVKAKYNREKTDVYPIDINIQKNMNSFWNFLYTKKFITEEKYKRLIRTSDLTDEELAKFISRQLVETSQSTKATAEVLKQIYGDSDICYVKAENVSDFRYGSSRQKDKNDIQKLFVKCREVNHFHHAKDAYLNIVVGNVYDVKFTKNPVNFIKKNKMGNKSNYSLNHMFCFDVERNGYKAWDSSETIKTVGRMMKSNDVRITKHVHPTRGELYDATIYKAKIAKTGSYMPLKSSKNTPLSDVTKYGGYTKIKIAYYSVYKYKFSDKNLIKTEIRLIPIPIYLSKNDDDIKEYVKNYLNDRVNSKLIDFTKIYDKLYVNSLIKINGYLYYLGGKTNDRVWIDNAVSIVLDDKIEYLIKRISNDIKYGYEINVSDDELMDIYESLAEKANKKIFYNRLSDFEKIFSNMDVKKKFVKLEKNDKCRVLLQLLNVLTDSQTTYKLEMVGLKHSRSNIGMKISNLEEFKVINSSITGLYSNEIDILNI

SEQ ID NO: 157 - protein, 1391 aa, Lactobacillus gasseri
MTKIKNEYIVGLDVGTNSCGWVAMDFQNTILRMHGKTAIGSHLFDAGNSAADRRAFRTTRRRIKRRKWRLKLLEEIFDPYMTEVDPYFFARLKESGLSPLDKRKNVSSIVFPTALEDKKFYCNYPTIYHLRYDLMSEDKKFDLREIYLAIHHIVKYRGNFLYNTPVKDFEASKIDVKDSLEKLNELYERLDSEFTVELDSSNALEIEKIIRDKKVFKINKVKSIHQLLSLKTENKERTKLIKDVSKQIINAILGYKTKFETILLKNISKDEADDWEFKLTDVDADNKFENLIGDLNENEQEILLEIRNLANAITLSNIVEEGKTLSESMIDKYNKHSDDLELLKQVISDHPDRDKAKKLALAYDLYVNNRHGKLLQAKDVLGSKKTLSKEDFYKEVKKNLDDSKASQEILDTIALDSFMPKQRTNENGVIPYQLHQLELDRIIKNQGKYYPFLKEVNPVSSHLKEAPYKLDELIRFRVPYYVGPLISPNESTKNKQTKKNQNFAWMIRKEQGQITPWNFDQKVDRMASANKFIKRMTTKDTYLLGEDVLPANSLLYQKFTVLNELNNIKINGKRISVPLKEELYNNLFKKNSTVTTNKLKSYLKENYNLINVEIKGLADEKKFNSGLTTYNKLRNLKIFDQQLDDLNYDKDFERIIEWSTIFEDKAIYKDKLKTIKWLSDRQIDKLSKIRMQGWGQLSKKLLSQLTDNNGQTIIEQLWDSQNNFMQIVNQSDFKDAIAVANQNLLVNTSVEDILNEAYTSPANKKAIRQVVKVVDDIVKAASGKVPKQIAIEFTRDADDKAKISQTRANKLRKVYKELSNELASETIRNELERVAKDQKLLKDKYYLYFMQLGRDAYTGEPINIDDLGQYDIDHILPQSFIKDDSLENRVLVKKAVNNGKSDNVPVKLYGNRMAADLGMTIRHMWEKWKDQGLITKTKYNNLIIDPDKINKYESSGFIHRQLVETSQIIKLVSTILQSKYPDTEIIVVKARYNHYLRKHLNLYKSREVNDYHHAIDAYLSAICGNLLYQVYPYLRPFFVYGQYKKFSSDPKKEKIIYDKTRKYNFISQIFENKSNDIISLETKKKVFDKKDIIEKLKHAYNYKYMLVSRETETHDQEMFKMTVYPRLSRDTKKSRNLISKKKDMPTEIYGGYTNNSDAYMVIARINKKKGTEYRVFGVPMRELVNLRKAEKNGRYNAYLKQVLEPEIMYSKNGKKNKTISSFEIVKAKVPYKQVILDGDKKFMLASSTYVQNAKQLTLSQNSMQAITDNCENDTEEEKALEEKALIEAYDEILTNIDKYLPLFDINKFREKLHAGREKFINLSLDVKKDTILQVLNGLHDNAVMPKIKSLGLSTPLGFMQFSSGVPLSENAKLIYQSPTGLFEKRVKISDL

SEQ ID NO: 158 - protein, 1426 aa, Sphingobacterium spiritivorum
MKHILGLDLGTNSIGWALIKQDFENKQGEILGMGSRIIPMSQDILGDFGKGNSVSQTAERTKYRSVRRLRERFLLRRERLHRILNVLGFLPEHYASQIDFTKRFGKFKEETEPKLVYSNEGFIFKKSFEEMLSDFKTHQPQLLEDNKKIPYDWTIYYLRKKALSRKIEKEELAWILLNFNQKRGYYQLRGEEEEENPNKLIEFYSLKIVDVLADEPQKGKSDIWYSLILENGWIYRRSSKTPLFDWKEKTRDFIVTIDLNDDGSVKTDKEGNEKRSFRAPGENDWTLVKKKTEQEIDSSRKTVGTYIYETLLKNPKQKIKGKLVRTIERKFYKTELKQILEKQKEFHPELRQDDLYSDCVRELYKNNEAHQLTLSKKDFVHLFMEDIIFYQRPLGSQKSSISNCTLEFRKYKDENGTEHTQYLKAIPKSNPYYQEFRIWQWMYNLNIYKKEDDTNVTKDFLNTKADFESLFEFLNNRKEVDQKALLKHFKLNDKTHRWNYVEDKKYPCNETKTMILSRLDKVENISDDFLTREMEQKIWHIIYSVNDKVEYEKALKSFAGKNNLEDNSFFEAFKKFPPFKSEYGAFSEKAIKKLLPLMRMGKFWNYNNISEQSKSRIQKIITGEYDENIKDKVREKAIHLTTETDFQGLQLWLVQYIVYGRHSEAAMLGKWNSADDLEEFLKEFKQHSLRNPIVEQVITETLRVVKDIWQKYGNGAKDFFREIHIELGREMKLPAEERERLTRQISENENTNFRIKALLAEMMDDNSVENVRPFSPMQQEILKIYEEGVLNSDIEIEDDILKISKTAQPSSSDLKRYKLWLEQKYKSPYTGQIIPLNKLFTPEYEIEHIIPQSRYFDDSFTNKIICESAVNKLKDNYIGLEFIKKLGGSIVECGNGKSVAILKHDAYEDFIKKHYANNRSKRNKLLLEDIPEKMIERQMNDTRYISKYISGVLSNIVRVEDGTDEGVNSKNIVPGNGKITTQLKQDWGLNDVWNDLILPRFERMNHLTNSTDFTAWNENHQKFLPTVPVEFSKGFSKKRIDHRHHALDALVIACATKDHVNLLNNQSAKSDTKRYDLKKKLMKFEKVAYNHPQTGERIEREAPKQFLKPWETFTIDAKNHLETIIVSFKQNLRVINKATNYYEKYVEKEGTKVKERVEQKGTNWAIRKPMHKETVSGKIDLPRIKVPKGKILTATRKSLDTSFNLKTIGSITDTGIQKILKNYLQYKDNNPELAFSPEGIEDMNKNIEKFNNGKAHQSISKVRVFELGSKFPLGQSGNKKEKYVEAAKGTNLFFAIYQDKNGKRSYETIPLNEVIERQKQGLSVVDLKGVDDFYLSPNDLVYVPSEDELENISMIDFNKMSSERIYKVVSFTGNQIFFVRQDIATSVVNKAEFSTLNKMERAIDGTMIKETCVKLQIDRLGNISKI

SEQ ID NO: 159 - protein, 1361 aa, Lactobacillus casei; identical to SEQ ID NO: 75

SEQ ID NO: 160 - protein, 1436 aa, Bacteroides fragilis
MKRILGLDLGTNSIGWALVNEAENKDERSSIVKLGVRVNPLTVDELTNFEKGKSITTNADRTLKRGMRRNLQRYKLRRETLTEVLKEHKLITEDTILSENGNRTTFETYRLRAKAVTEEISLEEFARVLLMINKKRGYKSSRKAKGVEEGTLIDGMDIARELYNNNLTPGELCLQLLDAGKKFLPDFYRSDLQNELDRIWEKQKEYYPEILTDVLKEELRGKKRDAVWAICAKYFVWKENYTEWNKEKGKTEQQEREHKLEGIYSKRKRDEAKRENLQWRVNGLKEKLSLEQLVIVFQEMNTQINNSSGYLGAISDRSKELYFNKQTVGQYQMEMLDKNPNASLRNMVFYRQDYLDEFNMLWEKQAVYHKELTEELKKEIRDIIIFYQRRLKSQKGLIGFCEFESRQIEVDIDGKKKIKTVGNRVISRSSPLFQEFKIWQILNNIEVTVVGKKRKRRKLKENYSALFEELNDAEQLELNGSRRLCQEEKELLAQELFIRDKMTKSEVLKLLFDNPQELDLNFKTIDGNKTGYALFQAYSKMIEMSGHEPVDFKKPVEKVVEYIKAVFDLLNWNTDILGFNSNEELDNQSYYKLWHLLYSFEGDNTPTGNGRLIQKMTELYGFEKEYATILANVSFQDDYGSLSAKAIHKILPHLKEGNRYDVACVYAGYRHSESSLTREEIANKVLKDRLMLLPKNSLHNPVVEKILNQMVNVINVIIDIYGKPDEIRVELARELKKNAKEREELTKSIAQTTKAHEEYKTLLQTEFGLTNVSRTDILRYKLYKELESCGYKTLYSNTYISREKLFSKEFDIEHIIPQARLFDDSFSNKTLEARSVNIEKGNKTAYDFVKEKFGESGADNSLEHYLNNIEDLFKSGKISKTKYNKLKMAEQDIPDGFIERDLRNTQYIAKKALSMLNEISHRVVATSGSVTDKLREDWQLIDVMKELNWEKYKALGLVEYFEDRDGRQIGRIKDWTKRNDHRHHAMDALTVAFTKDVFIQYFNNKNASLDPNANEHAIKNKYFQNGRAIAPMPLREFRAEAKKHLENTLISIKAKNKVITGNINKTRKKGGVNKNMQQTPRGQLHLETIYGSGKQYLTKEEKVNASFDMRKIGTVSKLAYRDALLKRLYENDNDPKKAFAGKNSLDKQPIWLDKEQMRKVPEKVKIVTLEAIYTIRKEISPDLKVDKVIDVGVRKILIDRLNEYGNDAKKAFSNLDENPIWLNKEKGISIKRVTISGISNAQSLHVKKDKDGKPILDENGRNIPVDFVNTGNNHHVAVYYRPVIDKRGQLVVDEAGNPKYELEEVVVSFFEAVTRANLGQPIIDKDYKTTEGWQFLFSMKQNEYFVFPNEKTGFNPKEIDLLDVENYGLISPNLFRVQKFSLKNYVFRHHLETTIKDTSSILRGITWIDFRSSKGLDTIVKVRVNHIGQIVSVGEY

SEQ ID NO: 161 - protein, 1517 aa, Bacteroides sp.
MKKIVGLDLGTNSIGWALINAYINKEHLYGIEACGSRIIPMDAAILGNFDKGNSISQTADRTSYRGIRRLRERHLLRRERLHRILDLLGFLPKHYSDSLNRYGKFLNDIECKLPWVKDETGSYKFIFQESFKEMLANFTEHHPILIANNKKVPYDWTIYYLRKKALTQKISKEELAWILLNFNQKRGYYQLRGEEEETPNKLVEYYSLKVEKVEDSGERKGKDTWYNVHLENGMIYRRTSNIPLDWEGKTKEFIVTTDLEADGSPKKDKEGNIKRSFRAPKDDDWTLIKKKTEADIDKIKMTVGAYIYDTLLQKPDQKIRGKLVRTIERKYYKNELYQILKTQSEFHEELRDKQLYIACLNELYPNNEPRRNSISTRDFCHLFIEDIIFYQRPLKSKKSLIDNCPYEENRYIDKESGEIKHASIKCIAKSHPLYQEFRLWQFIVNLRIYRKETDVDVTQELLPTEADYVTLFEWLNEKKEIDQKAFFKYPPFGFKKTTSNYRWNYVEDKPYPCNETHAQIIARLGKAHIPKAFLSKEKEETLWHILYSIEDKQEIEKALHSFANKNNLSEEFIEQFKNFPPFKKEYGSYSAKAIKKLLPLMRMGKYWSIENIDNGTRIRINKIIDGEYDENIRERVRQKAINLTDITHFRALPLWLACYLVYDRHSEVKDIVKWKTPKDIDLYLKSFKQHSLRNPIVEQVITETLRTVRDIWQQVGHIDEIHIELGREMKNPADKRARMSQQMIKNENTNLRIKALLTEFLNPEFGIENVRPYSPSQQDLLRIYEEGVLNSILELPEDIGIILGKFNQTDTLKRPTRSEILRYKLWLEQKYRSPYTGEMIPLSKLFTPAYEIEHIIPQSRYFDDSLSNKVICESEINKLKDRSLGYEFIKNHHGEKVELAFDKPVEVLSVEAYEKLVHESYSHNRSKMKKLLMEDIPDQFIERQLNDSRYISKVVKSLLSNIVREENEQEAISKNVIPCTGGITDRLKKDWGINDVWNKIVLPRFIRLNELTESTRFTSINTNNTMIPSMPLELQKGFNKKRIDHRHHAMDAIIIACANRNIVNYLNNVSASKNTKITRRDLQTLLCHKDKTDNNGNYKWVIDKPWETFTQDTLTALQKITVSFKQNLRVINKTTNHYQHYENGKKIVSNQSKGDSWAIRKSMHKETVHGEVNLRMIKTVSFNEALKKPQAIVEMDLKKKILAMLELGYDTKRIKNYFEENKDTWQDINPSKIKVYYFTKETKDRYFAVRKPIDTSFDKKKIKESITDTGIQQIMLRHLETKDNDPTLAFSPDGIDEMNRNILILNKGKKHQPIYKVRVYEKAEKFTVGQKGNKRTKFVEAAKGTNLFFAIYETEEIDKDTKKVIRKRSYSTIPLNVVIERQKQGLSSAPEDENGNLPKYILSPNDLVYVPTQEEINKGEVVMPIDRDRIYKMVDSSGITANFIPASTANLIFALPKATAEIYCNGENCIQNEYGIGSPQSKNQKAITGEMVKEICFPIKVDRLGNIIQVGSCILTN

SEQ ID NO: 162 - protein, 1399 aa, Olsenella uli
MNLRNTTDEYNIGLDMGTNSVGWAVTDKAGAIAHFKGKPTLGSRLFDAAQTAAGARIHRSQRRRYVRRRWRLDLLQSLFQDEVSKVDSEFFCRLRQSRLYVGDREKGHADYTWPIFNDSDFNEVDYYKRFPTIYHLRKWLMETDEKADIRLIYLATHNIVKHRGNFLRENNKSLSSRDANPAQAVKSLRLALNDWCSERDYECAWKGEEDDGAIDEAILNVLADGEKGRSDQAKEIAKLTGVDCGDAKQSKQCNEAIAKAIVGLKVEMKNIFGEFPAEKTSYIYLSSDEDVEAVRESCPDDSGELFQALCKLYSAYILQELLSYADPSGQTISANMVAKYKQYGRDLRLLKELTRTYAPQKYDLFFRGETYAGSSDYVVDEARGYTRYNLGTTKANYDDFQKSVKELFKGTDALQDERYQEMMVAFGEQKFLRRLKTSDNGSIYYQLHLEELHTILENQGKHYPFLLSEEDKIESLVSFRIPYYVGPLTRKNAAIGHDGKERFAWSSRKDGMEHAVITPWNWEEIIDRDKSAEDFIMRMTGDCTYLQGEPVLPKCSLLYEEFCALNEFNGAHWTVDGDDERRFDAAQRERIMCDLFRRTRSVTYNKVSDWLERKYNFTGARVRGGQGEHGFESKLGSYIFFCKDVFKTDGLDEADYTMIEQIILWSTLFEDRDILKRKIEEAYGGDRLTSEQIKVICKKRFTGWGRLSKRLLTDIKVNTDTGRKSIMDVLREGNPNNGQRSRTMVFMEVLRDEDLGFQKAIDGLNRDYFREHNNGLMDVNDLPGSPAIRRSINQAVRIVDEIASIARKEPTNIFIEVTREEDDPRKKGKRTKRRYDAIKSALEKFKKDDPSLWKELCEKAPGDMDERLSLYFMQRGKCMYSGRPIKIEELHTGKYEVDHIIPRSYIKDDSFENKVLVYREENQHKTDALLIDSSIRQKMGGYWRMLHDAKLVGDKKFRNLFRNHIDDKAMKGFVARQIVETSQMVKLVQTLFEARYPNTRIVPVKAGISHDLREAAGLVKCREANDFHHAHDAFLACRIGLFIQKRHPSVYDNPIGLARIMRDYARMQAREYKKSHCLAHTQGFIVNSFLSSGFDEETGEIFKDDWDAKAEVEGIRRVLNCRQCFISRMPVEGDTRYGGRYWGETIYSPKGKHKHEIPLKQGLDPNLYGGYSDLLYSYFLIYEASDVSSGERVLRFIGIPTSIAARMANQKRLEEYVSRLALQENLEHVRMVRKIMKKQLIEVDNCRLLVTAADAVTNATELAFSLDEMKIISTCAKCINGADPSAIDKIGNAQDSFFDNLKRRGSDRCALLFSQLKLDKLSQNFYMISSDDKSKILISILDRIRAKSNSVDLSLVGGAKHAAQMKFDFNAKLNNPASSFVLIDQSVTGMFERRTRIGL

SEQ ID NO: 163 - protein, 1398 aa, Veillonella atypica
METQTSNQLITSHLKDYPKQDYFVGLDIGTNSVGWAVTNTSYELLKFHSHKMWGSRLFEEGESAVTRRGFRSMRRRLERRKLRLKLLEELFADAMAQVDSTFFIRLHESKYHYEDKTTGHSSKHILFIDEDYTDQDYFTEYPTIYHLRKDLMENGTDDIRKLFLAVHHILKYRGNFLYEGATFNSNAFTFEDVLKQALVNITFNCFDTNSAISSISNILMESGKTKSDKAKAIERLVDTYTVFDEVNTPDKPQKEQVKEDKKTLKAFANLVLGLSANLIDLFGSVEDIDDDLKKLQIVGDTYDEKRDELAKVWGDEIHIIDDCKSVYDAIILMSIKEPGLTISQSKVKAFDKHKEDLVILKSLLKLDRNVYNEMFKSDKKGLHNYVHYIKQGRTEETSCSREDFYKYTKKIVEGLADSKDKEYILNEIELQTLLPLQRIKDNGVIPYQLHLEELKVILDKCGPKFPFLHTVSDGFSVTEKLIKMLEFRIPYYVGPLNTHHNIDNGGFSWAVRKQAGRVTPWNFEEKIDREKSAAAFIKNLTNKCTYLFGEDVLPKSSLLYSEFMLLNELNNVRIDGKALAQGVKQHLIDSIFKQDHKKMTKNRIELFLKDNNYITKKHKPEITGLDGEIKNDLTSYRDMVRILGNNFDVSMAEDIITDITIFGESKKMLRQTLRNKFGSQLNDETIKKLSKLRYRDWGRLSKKLLKGIDGCDKAGNGAPKTIIELMRNDSYNLMEILGDKFSFMECIEEENAKLAQGQVVNPHDIIDELALSPAVKRAVWQALRIVDEVAHIKKALPSRIFVEVARTNKSEKKKKDSRQKRLSDLYSAIKKDDVLQSGLQDKEFGALKSGLANYDDAALRSKKLYLYYTQMGRCAYTGNIIDLNQLNTDNYDIDHIYPRSLTKDDSFDNLVLCERTANAKKSDIYPIDNRIQTKQKPFWAFLKHQGLISERKYERLTRIAPLTADDLSGFIARQLVETNQSVKATTTLLRRLYPDIDVVFVKAENVSDFRHNNNFIKVRSLNHHHHAKDAYLNIVVGNVYHEKFTRNFRLFFKKNGANRTYNLAKMFNYDVICTNAQDGKAWDVKTSMNTVKKMMASNDVRVTRRLLEQSGALADATIYKASVAAKAKDGAYIGMKTKYSVFADVTKYGGMTKIKNAYSIIVQYTGKKGEEIKEIVPLPIYLINRNATDIELIDYVKSVIPKAKDISIKYRKLCINQLVKVNGFYYYLGGKTNDKIYIDNAIELVVPHDIATYIKLLDKYDLLRKENKTLKASSITTSIYNINTSTVVSLSNKVGIDVFDYFMSKLRTPLYMKMKGNKVDELSSTGRSKFIKMTLEEQSIYLLEVLNLLTNSKTTFDVKPLGITGSRSTIGVKIHNLDEFKIINESITGLYSNEVTIV

SEQ ID NO: 164 - protein, 795 aa, Prevotella disiens
MEKQRILGLDPGTNSLGWAVLDFDNSKQEYNLVRKGEVIFEEGVGKSKRGEFSKAAYRTFYKSTRKHYFRRRLRKIEVLKVLVKYDFCPYLSDDLLKQWHEKKIYPAVKEFMDWQRTSDAEGKNPYYDRHCCLNEKLDLSLKSDRYVLGRALYHLTQRRGFKSNRLIQNNDENEEGKVKKGISELSTEMQEANCNYLGDYFYKLYTEKGNTVQIRKRYTDREKHYKNEFNAICEKQELNETIVKELDKAIFFQRKLKPQRHGVGKCTFEPNNRRCAISHPDFERFRMLCFINNIKIKTPFEENLRPLNNEEKALIEPLFYRKSIKNFDFEEIAKKLAGKNNYCYIKDDSSKQYKFNYRMSQGASTCQTIAKLKSIFGEEWKNGIAETYTNRRKKEGLKKQAEMVDDIWNVLYSVSECDVLKDFAINKLQLDEKTADNFSKTKLAQGFATLSLKAIRKILPFLEQGFGYTEAVFLANIPTVVGKEYWNNEDIRNDIMEEIKTIFYHNTLKTNDSHNTILFCIKDILSNNFDLAPGAIDKLYHPSMINVYKDVIPNEDGILQLGSPKIDAVKNPMAMRSLHIIRKVVNELLREGIINSDTEVRIEYARELNDANKRHAIADWQKKQYGKHQKYRKEIKELFKAETGFEIEPNETDILKFELWEEQNHICLYTGQEIGISEFVGENPKYDIEHTIPRSLGGDSTKMNMTLCENKFNRENKQKKLPSELANHSEILERIDDWKKKIYILQKKYDSIRTHNGMDKENKDKKIVSMQVRISGSSICVYSQNTLLWLQYGYN

SEQ ID NO: 165 - protein, 1428 aa, Burkholderiales bacterium
MGKTHIIGVGLDLGGTYTGTFITSHPSDEAEHRDHSSAFTVVNSEKLSFSSKSRTAVRHRVRSYKGFDLRRRLLLLVAEYQLLQKKQTLAPEERENLRIALSGYLKRKGYARTEAETDTSVLESLDPSVFSSAPSFTNFFNDSEPLNIQWEAIANSPETTKALNKELSGQKEADFKKYIKTSFPEYSAKEILANYVEGRRAILDASKYIANLQSLGHKHRSKYLSDILQDMKRDSRITRLSEAFGSTDNLWRIIGNISNLQERAVRWYFNDAKFEQGQEQLDAVKLKNVLVRALKYLRSDDKEWSASQKQIIQSLEQSGDVLDVLAGLDPDRTIPPYEDQNNRRPPEDQTLYLNPKALSSEYGEKWKSWANKFAGAYPLLTEDLTEILKNTDRKSRIKIRSDVLPDSDYRLAYILQRAFDRSIALDECSIRRTAEDFENGVVIKNEKLEDVLSGHQLEEFLEFANRYYQETAKAKNGLWFPENALLERADLHPPMKNKILNVIVGQALGVSPAEGTDFIEEIWNSKVKGRSTVHSICNAIENERKTYGPYFSEDYKFVKTALKEGKTEKELSKKFAAVIKVLKMVSEVVPFIGKELRLSDEAQSKFDNPYSLAQLYNLIETERNGFSKVSLAAHLENAWRMTMTDGSAQCCRLPADCVRPFDGFIRKAIDRNSWEVAKRIAEEVKKSVDFTNGTVKIPVAIEANSFNFTASLTDLKYIQLKEQKLKKKLEDIQRNEENQEKRWLSKEERIRADSHGICAYTGRPLDDVGEIDHIIPRSLTLKKSESIYNSEVNLIFVSAQGNQEKKNNIYLLSNLAKNYLAAVFGASDLSQITNEIESTVLQLKAAGRLGYFDLLSEKERACARHALFLNSDSEARRAVIDVLGSRRKASVNGTQAWFVRSIFSKVRQALAAWTQETGNELIFDAISVPAADSSEMRKRFAEYRPEFRKPKVQPVASHSIDAMCIYLAACSDPFKTKRMGSQLAIYEPINFDNLFTGSCQVIQNTPRNFSDKTNIANSPIFKETIYAERFLDIIVSRGEIFIGYPSNMPFEEKPNRISIGGKDPFSILSVLGAYLDKAPSSEKEKLTIYRVVKNKAFELFSKVAGSKFTAEEDKAAKILEALHFVTVKQDVAATVSDLIKSKKELSKDSIENLAKQKGCLKKVEYSSKEFKFKGSLIIPAAVEWGKVLWNVFKENTAEELKDENALRKALEAAWPSSFGTRNLHSKAKRVFSLPVVATQSGAVRIRRKTAFGDFVYQSQDTNNLYSSFPVKNGKLDWSSPIIHPALQNRNLTAYGYRFVDHDRSISMSEFREVYNKDDLMRIELAQGTSSRRYLRVEMPGEKFLAWFGENSISLGSSFKFSVSEVFDNKIYTENAEFTKFLPKPREDNKHNGTIFFELVGPRVIFNYIVGGAASSLKEIFSEAGKERS

SEQ ID NO: 166 - protein, 1025 aa, gamma proteobacterium
MGGYMPQLMRYRLALDIGSTSIGWAMIRLSMQNEPIAIIRMGVRIFSDGRNPKDGSSLAVTRRVARQMRRRRDRLLKRKTRLLNALVQKKFFPEDADARKALVVLNPYELRKEGLYRQLSGPEFGRALFHISQRRGFLSNRKTDKKDNDSSVLKKAIVDLRQQLEVENCQTIGEWLFKQQQSGKSVRARLRGKTQKDKAYDFYIDRAMIAHEFDTLWVSQAKYDPLLFNEDARAILRDILLYQRPLKPVKPGRCTLIPDESRAPLALPLTQQARIYQELNHLRITTPALGAQALTVAQRNTIAALLEKSDVTFVKIAKALGLTSTTEFNLQDIKRDRLKGNATAIILARNQYFGRRWHDFNADLQNLIVDKLVNEGSETALIEWLKANTDVDESAAERVSGVTLPEGYGSLSVAALRRLLPALKEDVVVYSEAVKRAGFDSHSALSLIEQTGELYQELPYYGEVLQRHVGFGSGDPNDSPERRFGKIANPTVHIGLNELRKIINALIKRYGNPAEVVVELARDLKLSREKRKEIQEEQKQRQDRNEKRIKDACEILGIDPLVIDRGKRREISQKMQLWDELNPKDAANRRCPYTGDQISIEKLLSAEVEIEHILPFSKTLDDSLNNKTVAMRRANRDKGNRTPYEAFGESLNPDYDYDAILQRASLMPREKRKRFASDGYQQWLRDDKDFLSRALNDTAYLSRIAKEYLTLICPPNSVRAIPGRMTAQLRAMFGLNRLLSEGGIKNREDHRHHAIDAAVIGVTDQGLLQKFSRASARTRELQLSRLVDDMPLPWDTYREHVTRALEHLVVSHKPDHGYQGKMHEDTAWGLRDNGQVTRRVRSEDGGPRQRLLENKNVVKINSTRDFSRHGIDEQGQVNAYKGYVGGSNYCIEIWIDEKGKWNSDVVSTFQAYQIVRELGEKAAWQKLRNPLLSLSAKPLVMRLIIDDVVKMQIAGQNKIMRVVKIAQNGQIFFAEHNEANVDARDKDKNNPFKYISKTAGSLQKAGGIHMAISPIGDARPVRYGR

SEQ ID NO: 167 - protein, 1364 aa, Pediococcus acidilactici
MGDRKYNLGLDIGTSSIGFAAVDENNQPIRVKGKTAIGVRLFEEGKTAADRRGFRTTRRRLSRRRWRINLLNEIFDAHLAEVDPTFLARLKESNRSNLDPKKSFQGSLLFPERKDYQFYEEYPTIYHLRKALMEKDRKFDFREIYLAVHHIIKYRGNFLNGTPMRSFKVENIELDTLFDQLNQLYAEIVPDNELAFDLAQVADVKDVLSSTTIYKMDKKKQLVKMMLLPASNKALQSENKKIVTQFVNAILNYKFKLDVLLQVETDADWSLKLNDEGADDKLEEFTGDLDENRLEIIDLLQRLHNWFSLNEITKDGNSLSAAMVEKYENHHHHLGLLKKVIENHPDAKKAKALKETYTAYVGKTDDKTQNQDDFYKAVEKNLDDSPDAKEIKRLIQLDQFMPKQRTGQNGAIPHQLHQQELDQIIEKQSKYYPFLAEPNPNVKRRKDAPYKLDELIAFKIPYYVGPLVTPEEQAQNGENVFAWMKRKAAGPITPWNFDEKVDRMESANRFIRRMTTKDTYLFGEDVLPAESMIYQKFVVLNELNNLKINGRHLSLKDKQDVYNDLFKQQKTVSIKALQNYYVTKKKAATAPTVGGLADPKKFLSSLSTYIDFKNMFGERVNDPQFQEDLEQIVEWSTIFEDRGIFKAKLQALGWLSEKQIQQLVAKRYKGWGRLSKKLLTGLKNAEGYSILDEMWRSTGNFMQIQSRPEFAALIQQANEKQFEGNDPDNVWENIENILGDAYTSPQNKKAIRQVVKVVQDIEKAVGNPPEKIAIEFTREAAANPQRTQSRLRTLEKLYESAEEVVDAGLTAELAEFKENKHVLSDKYYLYFTQLGRDVYTGDTISLDKLNDYDVDHILPQSFIKDDSLDNRVLTIRAVNNGKSDNVPAKMFGKKMGSFWRYLLDNGMISKRKYNNLITDPDNISKYAQKGFINRQLVETSQVIKLTANILNGIYDKDTEIIEVPAKMNSQMRKMFDLVKVREVNDYHHAFDAYLTIFIGNYLYKCYPKLQPYFVYDNFKKFGNKEDIGHKRFNFLGKIEREKKVVAPETGEILWSNVAPNETIKQIKKVYDYKFMIVSREITTRRAELFNQTVYPKNYHGKLIPIKEDRPTDLYGGYSGNTDAYLAIVALEDKKKGKYFKVVGIPTRVAAKLEKLKQQDSQQYLQALHKVIAPQFTKSTKKGIKKTEFEIVLDKVHYRQLVQDGPVKMMLGSSTYKYNAKQLVLSEKALQVIADDRKFDETQKDDNLIAVYDEILSIVNQSFDLYDINGFRKKLNDNRDQFIDLPAETKYEGRKVVAHGKREMILEILKGLHANAAFGNLKPIGFSTAFGQLQVPNGIILSKNAILIHQSPSGLFERKIKLSDL

SEQ ID NO: 168 - protein, 1364 aa, Peptoniphilus duerdenii
MKNLKEYYIGLDIGTASVGWAVTDESYNIPKFNGKKMWGVRLFDDAKTAEERRTQRGSRRRLNRRKERINLLQDLFATEISKVDPNFFLRLDNSDLYREDKDEKLKSKYTLFNDKDFKDRDYHKKYPTIHHLIMDLIEDEGKKDIRLLYLACHYLLKNRGHFIFEGQKFDTKNSFDKSINDLKIHLRDEYNIDLEFNNEDLIEIITDTTLNKTNKKKELKNIVGDTKFLKAISAIMIGSSQKLVDLFEDGEFEETTVKSVDFSTTAFDDKYSEYEEALGDTISLLNILKSIYDSSILENLLKDADKSKDGNKYISKAFVKKFNKHGKDLKTLKRIIKKYLPSEYANIFRNKSINDNYVAYTKSNITSNKRTKASKFTKQEDFYKFIKKHLDTIKETKLNSSENEDLKLIDEMLTDIEFKTFIPKLKSSDNGVIPYQLKLMELKKILDNQSKYYDFLNESDEYGTVKDKVESIMEFRIPYYVGPLNPDSKYAWIKRENTKITPWNFKDIVDLDSSREEFIDRLIGRCTYLKEEKVLPKASLIYNEFMVLNELNNLKLNEFLITEEMKKAIFEELFKTKKKVTLKAVSNLLKKEFNLTGDILLSGTDGDFKQGLNSYIDFKNIIGDKVDRDDYRIKIEEIIKLIVLYEDDKTYLKKKIKSAYKNDFTDDEIKKIAALNYKDWGRLSKRFLTGIEGVDKTTGEKGSIIYFMREYNLNLMELMSGHYTFTEEVEKLNPVENRELCYEMVDELYLSPSVKRMLWQSLRVVDEIKRIIGKDPKKIFIEMARAKEAKNSRKESRKNKLLEFYKFGKKAFINEIGEERYNYLLNEINSEEESKFRWDNLYLYYTQLGRCMYSLEPIDLADLKSNNIYDQDHIYPKSKIYDDSLENRVLVKKNLNHEKGNQYPIPEKVLNKNAYGFWKILFDKGLIGQKKYTRLTRRTPFEERELAEFIERQIVETRQATKETANLLKNICQDSEIVYSKAENASRFRQEFDIIKCRTVNDLHHMHDAYLNIVVGNVYNTKFTKNPLNFIKDKDNVRSYNLENMFKYDVVRGSYTAWIADDSEGNVKAATIKKVKRELEGKNYRFTRMSYIGTGGLYDQNLMRKGKGQIPQKENTNKSNIEKYGGYNKASSAYFALIESDGKAGRERTLETIPIMVYNQEKYGNTEAVDKYLKDNLELQDPKILKDKIKINSLIKLDGFLYNIKGKTGDSLSIAGSVQLIVNKEEQKLIKKMDKFLVKKKDNKDIKVTSFDNIKEEELIKLYKTLSDKLNNGIYSNKRNNQAKNISEALDKFKEISIEEKIDVLNQIILLFQSYNNGCNLKSIGLSAKTGVVFIPKKLNYKECKLINQSITGLFENEVDLLNL

SEQ ID NO: 169 - protein, 1089 aa, Corynebacterium matruchotii
MNSANVNYRVGIDVGSYSLGMAAIAIDDDGKPTEILSAISLIHDSGVDPDSAKSAATRLATSGIARRTRRLYRRKRKRLAKLDKFISSQGWPLKEFEKYEDPFYPWRVRAELATTAITDQQELGEKLSIALRHIARHRGWRNPYSKVTALYTVTEPSDAFLAMQEECAKQLGRTIPETITVGQLVTGMNLGKTRLRGENSLLAARPRQSDNANEIHTIAKVQGLSNELVRQIIDHVFAAESPKGSAAEQVGKDPLQPTKKRALKASDAFQQYRIAALIGNLRIRGGKGNRRLTTEETRLVFDYLRSLPAKQEPTWQLVAEQLKIDRGNLVGTAIMTDDGERAGAKPPVHDTNRIMENTKIKPLATWWKSADADARAAMVKALSNAEVDDFDSQAGAQVQEFFFGISDEDQEKLDGLHLPIGRAAYSEDTLDRLTKRMIGEGMDLYEARQAEFKISNDWAPPAPEIGERVGNPAVDRVLKATARWLNAAERQWGAPKSVNIEHVRAAFMSESSARELDRDNQQRAKRNVKVVAEMQEKLGIEGRPSRADVWRFQSIQRQNGKCAYCGAEISFKNSEMDHIIPQAGEGSTNTRDNLVAVCRECNSSKSNIAFAVWAENTSRPGVSVQKAIERTHHWVTDSGLRKPEFDKFRKQVCDRLRRKATDEPIDARSLESVAWMANELRSRIAQKFKDGDTKVRVYKGALTAEARRASGISGKLEFVDGKGKSRLDRRHHAVDAAVVAFTSNYVAETLALRSNMKFDQELRRKAPQWREFTGSDHVHQVEWTKWKYRMQALAELLNNALVQDRIVVMHNLRLRLGNGAAHEDTIGKLTRLKVGDAISTTDIDRASSEALWCALTRDPDYDPKTGLPENPNRTIRIHGTHLTASDEITVFPVAAASIPIRDGFAKLGSNYHHVRLFRVPSGKKYKYCLMQVYTVDLLKFRKEDLFTVELKPQTISVRTCEALLRKALANGTAEYLGWLVSDDELLIDTSSFDTPGIVKLREEYGPVNRWRLAGLTSVTRLNLRPLYLSKEGLKPNVNPEIKKIIDNRSWIITVNKLFSSGHVKIIRRDALGRPRLHSAAHLPICWEVK

SEQ ID NO: 170 - protein, 1134 aa, Streptococcus mitis
MNGLVLGLDIGIASEGVGILEKNSGKIIHANSRLFPAATADNNVERRKNRQARRLNRRKKHRGVRFQDLFEDYGLLTDFSKVSINLNPYRLRVDGLNQQLTNEELFIALKNIVKRRGISYLDDASEDGGAVSSDYGKAVEENRKLLAEQTPGQIQLERFEKYGQVRGDFTVVENGEKLRLINVFSTSAYKKEAERILRKQQEFNNQITDEFIEDYLKILTGKRKYYHGPGNEKSRTDYGRFRTDGTTLDNIFGILIGKCTFYPEEYRASKASYTAQEFNLLNDLNNLTVPTETKKLSEEQKKVIVEYAKEAKTLGASTLLKYIAKMIDASVDQIRGYRVDVNNKPEMHTFEVYRKMQSLETISVGELSRNVLDELAHILTLNTEREGMEEAINTKLKDSFSQDQVLELVQFRKNNSSLFSKGWHNFSLKLMMELIPELYETSEEQMTILTRLGKQKSKETSKRTKYIDEKELTEEIYNPVVAKSVRQAIKIINEATKKHGIFDNIVIEMARENNEEDAKKDYIKRQKANQDEKNAAMEKAAFQYNGKKELPDNIFHGHKELATKIRLWHQQGEKCLYTGKTIPISDLIYNQYKYEIDHILPLSLSFDDSLSNKVLALATANQEKGQRTPFQALDSMDDAWSYREFKSYVKDLKSLSNKKKDYLLTEEDISKIEVKQKFIERNLVDTRYSSRVVLNALQDFYKSHQFDTTISVVRGQFTSQLRRKWGLEKSRETYHHHAVDALIIAASSQLRLWKKQNNPLITYKEGQFVDSQTGEIISLTDDEYKELVFKAPYDHFVDTLSSKTFEDSILFSYQVDSKFNRKISDATIYATRKAKLDKEKKEYTYTLGKIKDIYSLGTKTPSKTGFYKFLDLYNKDKSQFLMFQKDRKTWDEVIEKIMEQYRPFKEYDKTGKLVDFNPFEKYRQENEPIRKYSKKGNGPEIKSLKYYDILLGKHKNITPEGSRNTVALLSLNPWRTDVYYNMETKKYEFLGLKYADLPFEEGGAYGISTETYNELREKEGIGKNSEFKFTLYKNDLILIKDTETNCQQIFRFWSRTGKDNPKSFEKHKIELKPYEKARFEKGEELEVLGKVPPSSNQLQKNMQIENLSIYKVKTDVLGNKHFIKKEGDKPKLKF

SEQ ID NO: 171 - protein, 1373 aa, Streptococcus bovis
MTKKNYSIGLDIGTNSVGWAVITDDYKVPAKKMKVLGNTDKKYIKKNLLGALLFDSGETAEATRLKRTARRRYTRRKNRLRYLQEIFAEEMTKVDESFFQRLDESFLRWDDDNKKLGRYPIFGNKADVVKYHQEFPTIYHLRKHLADSSEKADLRLVYLALAHMIKFRGHFLIEGELNAENTDVQKIFADFVGVYDRTFDDSHLSEITVDAASILTEKISKSRRLENLIKYYPTEKKNTLFGNLIALALGLQPNFKMNFKLSEDAKLQFSKDSYEEDLGELLGKIGDDYADLFTSAKNLYDAILLSGILIVDDNSTKAPLSASMIKRYVEHQEDLEKLKEFIKANKSELYHDIFKDKNKNGYAGYIENGVKQDEFYKYLKNTLSKIAGSDYFLDKIEREDFLRKQRTFDNGSIPHQIHLQEMHAILRRQGDYYPFLKENQDRIEKILTFRIPYYVGPLARKDSRFSWAEYHSDEKITPWNFDKVIDKEKSAEKFITRMTLNDLYLPEEKVLPKHSHVYETYAVYNELTKIKYVNEQGKDSFFDSNMKQEIFDHVFKENRKVTKEKLLNYLNKEFPEYRIKDLIGLDKENKSFNASLGTYHDLKKILDKAFLDDKVNEEVIEDIIKTLTLFEDKDMIHERLQKYSDIFTADQLKKLERRHYTGWGRLSYKLINGIRNKENNKTILDYLIDDGSANRNFMQLINDDTLPFKQIIQKSQVVGDVDDIEAVVHDLPGSPAIKKGILQSVKIVDELVKVMGDNPDNIVIEMARENQTTNRGRSQSQQRLKKLQNSLKELGSNILNEEKPSYIEDKVENSHLQNDQLFLYYIQNGKDMYTGDELDIDHLSDYDIDHIIPQAFIKDDSIDNRVLTSSAKNRGKSDDVPSLDIVRARKAEWVRLYKSGLISKRKFDNLTKAERGGLTEADKAGFIKRQLVETRQITKHVAQILDARFNTESDENDKVIRDVKVITLKSNLVSQFRKDFEFYKVREINDYHHAHDAYLNAVVGTALLKKYPKLASEFVYGEYKKYDIRKFITNSSDKATAKYFFYSNLMNFFKRVIRYSNGKVIVRPVVEYSKDTEDIAWDKKSNFRTICKVLSYPQVNIVKKVETQTGGFSKESILPKGDSDKLIPRKTKKAYWDTKKYGGFDSPTVAYSVFVVADVEKGKAKKLKTVKELVGISIMERSFFEENPVEFLENKGYHNIREDKLIKLPKYSLFEFEGGKRRLLASASELQKGNEMVIPGHLVKLLYHAQRINSFNSTKYLDYVSAHKKEFEKVLSCVEDFANLYVDVEKNLSKIRAVADSMDNFSIEEISNSFINLLTLTALGAPADFNFLGEKIPRKRYTSTKECLNATLIHQSITGLYETRIDLSKIGEE

SEQ ID NO: 172 - protein, 1099 aa, Corynebacterium accolens
MSLLYRVGIDVGTYSLGCTAIEVDDNDQPVSILSSVSLIHDSGLDPDQQKRAVTRLASSGVARRTRRLYRRRRRRMVKLENFLTAQGWETLPFERYSDPYLPWHARVALVNGYISDDTQRGQYLSIAFRHIANHRGWRNPYWKVSSLYSPDKPSDAFEQIRKELEASTGRQIPETATVGQLISFAQFGKDRLRGGGKQKDKKKPQEQVNQAVISARLHQIDHAREINEICRVQKIDDTLRKQILDLVFAAESPKGAQKGRVGKDPLQPKLFRALKASDAFQQYRIAALTGNLRIYRNGVTVPLDRDEKLIVFNYLVNLPKKEEPSWLKIAEILNIDRGQLRGTATMTDDGERAGATPPVHDTNRTILDSKVKPLAHWWENASDDERAAMLKSLSNSEVEDFDSPAGAQVQAFFADLDETEQEKLDSLHLPMGRAAYSEDTLMRLTNRMLDENLDLYEARLAEFGIPKDWAPPAPRIGEPVGNPAVDRVLKGVARWLEAAADEWGAPKSVVIEHVRDGFVSKSKAIEIDRANNNRHKRNRELFQKMQENLGIEGKVRSSDLWRYQSVQRQNCQCAYCGSPITYTTCEMDHIVPRAGEGSTNTRDNLVATCHRCNLAKKNIPFAVWAEKSTIPGVSVKEALDRTRHWSEDSGMSKKDFQKFRKNVCERLNRTVVDEPLDARSMESVAWMANELRGRVAQRFQEENTTVNVYRGALTAEARRAAGITDKLRFIDGTGKSRLDRRHHAVDAAVVAFIHNYVAETLAIRSNKKREAQLLQGTSQWKEFTGSDDKHRAVWNAWIPKMQKLAVLLQIALDEDRIVVTSNLRLRLGNGRAHEDTISELKTIRVGDAISVTDIDRASSEALWCALTREPDFDEKDGLPENPNRRIRVHGTWYDAEDEIEVFPVGAGAIKVRGGYAKLSRFHHARVYKIPGKKAPIYCMLRVYNTDLVQHRHEDLFSVELKPQTMSVRQAEPKLRKALAENTAEYLGWLVTDDELIIDTSTFRTGLIEEMQSEFGLVRRWRLDGFDSPSLLTLRPLHMSAEGLPDDCALGSRKIIDTKGWRVSINKVFNAGNTTVVRRDALGRARLTSNAHLPISWKEE

SEQ ID NO: 173 - protein, 1054 aa, Actinobacillus pleuropneumoniae
MKLTPLNYILGLDLGIASVGWAVVEIDEQENPLGLIDVGVRTFDRAEVAKTGESLALARRLARSSRRLVKRRADRIKKVKRLLKSENILLSADEQLPNDVWQLRVKGLDQKLERQEWAAVLLHLLKHRGYLSQRKNESKSENKELGALRSGVAANHQILQSAEYRTPAEIAVKKFHVEEGHIRNQRGAYTHTFSRLDLLAEIELLFTRQTELGNPHTSAKLLENLTALLMWQKPALAGEAILKMLGKCTFEPTEYKAAKNSYSAERFVWLTKLNNLRILEQGAERALTDNERFALLDQPYEKAKFTYAQARTMLALPDEAIFKGVRYQGEDKKAVETKTILMEMKAYHQIRKALENADLKAEWNELKNNSELLDDIGTAFSLHKTDEDICRYLDGKLSESILNALLENLNFDKFIQLSLKALQQILPLMLQGQRYDEAVSAIYGDHYGKKSAEINRLLPTIPADEIRNPVVLRTLTQARKVINAVVRLYGSPARIHIETGREVGKSYQDRKKLEKQQEDNRKHRESAVQKFKEYFPNFVGEPKGKDILKMRLYELQQAKCLYSGKSLELHRLLEKGYVEVDHALPFSRTWDDSFNNKVLVLANENQNKGNLTPYEWLDGKNNSEPWQNFVARVQTSGFSHTKKQRILSHKLDEKGFIERNLNDTRYVVRFLCNFIADNMLLTGKGKRKVFASNGQITALLRGRWGLQKVRDDNDRHHALDAVVVACSTVAMQQKITRFVRYEEGNVFSGERIDRETGEIIPLHFPSPWAFFRENVEIRIFSENPKLELENRLPDYPQYNHEFVQPLFVSRMPTRKMTGQGHMETVKSAKRLDEGLSVLKVPLTQLKLNDLERMVNREREMALYESLKVRLEQFDNDPAKAFAEPFYKKGGALVKAVRVEQTQKSGVLVRDGNGVADNASMVRVDVFTKAGKYFLVPIYTWQVAKGILPNKAVTANVDEIDWLEMDESYQFIFTMYPNDLVKVKLKKEEFFGYYGGLDRATGAIVIKEHDLEKSKGRQGIYRIGVKLALSFEKYQVDELGKNIRPCRPTKRQHVR

SEQ ID NO: 174 - protein, 1369 aa, Lactobacillus iners
MNNNYYLGLDLGTNSVGWAVTDDHYNIIKFHGKHMWGMRLFEEAETAKDRRLHRQARRRRQRLVERINLLEELFDKEISKVDQGFFARKKESDLHFEDKTTKSEYALFNDKSYTDRDYYKQYPTIFHLIMDLIENDKKRDIRLVYLACHYLIKHRGHFIFDGKNFTVDNSFENLLDKLITYLKDNDDITLSFPKDQLINIFKNSNLNSTEKSDQLKPFFGRTNLEKGIIKLLSGGKQDLSNMFRDETLKNSNYKNLKFSDNRFDDERDGYAADLGDRIDLLILLKQIYDASILESMMSQARVSIDGHKYISSAKVCAYEKHKSDLKRLKSLIKKYLPSEYNNIFRKITEKDNYVAYSKSNITNNKREKALKYVKYVDFTKYLTKKLKTIKTQDAEDDQEIFEIKGELEKQSFLPKQRTLDNSIIPYQLHLMELKKILDNQSKYYDFLLAKDDQEGITVKDKIISLLTFRLPYYIGPVNPAVHGKFAWVKRLANGKVTPWNYKEKIDIDASHEEFIKTKLSKCSFLIGCDVLPKNSLLYQKYMVLSELNTIKFNGVNISEKLKDDIYQNLFKNIQKVTKKRLQNYIKEHENIIGDVIVTGIDNAFKQGLVSYLKFKKIIGDKVDDDRYQKVLEKIIRDITLYDECAGKKIKKEYKDSDLFTEDELNKIVKLTFNDWGRLSAELLDQLEGEDTVSGETGKIIEFMQKHNYNLMQLMSKKFTFKSKIDEINKSYYQHDKFNYKSMIDSLYVSPATKRILWQSLKVVHEISKIMKHDPEKIFIEMARSKEDHPKRKLSRKADLKQVYKDSKKQIISIIGKDKYQDLSNELDNKDDRDLRWDNLYLYYTQLGRSMYSLKPIDISELMNKNLYDQDHIFPKSKKYDDSIENRVLVEKELNVKKSDIYPISDANIIPQKIKGQVESFWKMLYDHKLIGDKKYARLIRSKAFTDDELAGFIARQLVETRQATKETADLLKRLCPKSRIVYAKAQNASIFRQKFDIPKSRTINDLHHAQDAYLNIVVGNIFDTKFTQDPRNFIKNTKDSRNYNLEKIYDYNVERNNYVAWIAPDGETNGTIANVKCNLSTKDFRVTRPSFYKKGALFNQNLSRKGSNLAPIKEHSPKSNPLKYGGYSGKNNSFFVVVAGKDNKGKDIVKLIPVNTLIYNKMLHCDYKAKQELLTSYVANNFAINNFRIVKDDIKMYSLVKIDGAYYYLVGGTDERIEVKNAMQLLLSKDSIKAVKILEKESKDQFANIKNYKDIDIKLGRTFNEVVSKYTNSVFGKSMLISDKYRKDIFKSVEKSILEFNHLDTIGKADNLLKFVTLMRPSGSAHSLKMVGLIERIRKSNVISNFNEFKLINQSVTGLFENEEDLLKL

SEQ ID NO: 175 - protein, 1420 aa, Bifidobacterium bifidum
MSRKNYVDDYAISLDIGNASVGWSAFTPNYRLVRAKGHELIGVRLFDPADTAESRRMARTTRRRYSRRRWRLRLLDALFDQALSEIDPSFLARRKYSWVHPDDENNADCWYGSVLFDSNEQDKRFYEKYPTIYHLRKALMEDDSQHDIREIYLAIHHMVKYRGNFLVEGTLESSNAFKEDELLKLLGRITRYEMSEGEQNSDIEQDDENKLVAPANGQLADALCATRGSRSMRVDNALEALSAVNDLSREQRAIVKAIFAGLEGNKLDLAKIFVSKEFSSENKKILGIYFNKSDYEEKCVQIVDSGLLDDEEREFLDRMQGQYNAIALKQLLGRSTSVSDSKCASYDAHRANWNLIKLQLRTKENEKDINENYGILVGWKIDSGQRKSVRGESAYENMRKKANVFFKKMIETSDLSETDKNRLIHDIEEDKLFPIQRDSDNGVIPHQLHQNELKQIIKKQGKYYPFLLDAFEKDGKQINKIEGLLTFRVPYFVGPLVVPEDLQKSDNSENHWMVRKKKGEITPWNFDEMVDKDASGRKFIERLVGTDSYLLGEPTLPKNSLLYQEYEVLNELNNVRLSVRTGNHWNDKRRMRLGREEKTLLCQRLFMKGQTVTKRTAENLLRKEYGRTYELSGLSDESKFTSSLSTYGKMCRIFGEKYVNEHRDLMEKIVELQTVFEDKETLLHQLRQLEGISEADCALLVNTHYTGWGRLSRKLLTTKAGECKISDDFAPRKHSIIEIMRAEDRNLMEIITDKQLGFSDWIEQENLGAENGSSLMEVVDDLRVSPKVKRGIIQSIRLIDDISKAVGKRPSRIFLELADDIQPSGRTISRKSRLQDLYRNANLGKEFKGIADELNACSDKDLQDDRLFLYYTQLGKDMYTGEELDLDRLSSAYDIDHIIPQAVTQNDSIDNRVLVARAENARKTDSFTYMPQIADRMRNFWQILLDNGLISRVKFERLTRQNEFSEREKERFVQRSLVETRQIMKNVATLMRQRYGNSAAVIGLNAELTKEMHRYLGFSHKNRDINDYHHAQDALCVGIAGQFAANRGFFADGEVSDGAQNSYNQYLRDYLRGYREKLSAEDRKQGRAFGFIVGSMRSQDEQKRVNPRTGEVVWSEEDKDYLRKVMNYRKMLVTQKVGDDFGALYDETRYAATDPKGIKGIPFDGAKQDTSLYGGFSSAKPAYAVLIESKGKTRLVNVTMQEYSLLGDRPSDDELRKVLAKKKSEYAKANILLRHVPKMQLIRYGGGLMVIKSAGELNNAQQLWLPYEEYCYFDDLSQGKGSLEKDDLKKLLDSILGSVQCLYPWHRFTEEELADLHVAFDKLPEDEKKNVITGIVSALHADAKTANLSIVGMTGSWRRMNNKSGYTFSDEDEFIFQSPSGLFEKRVTVGELKRKAKKEVNSKYRTNEKRLPTLSGASQP

SEQ ID NO: 176 - protein, 1092 aa, Ilyobacter polytropus
MKYSIGLDIGIASVGWSVINKDKERIEDMGVRIFQKAENPKDGSSLASSRREKRGSRRRNRRKKHRLDRIKNILCESGLVKKNEIEKIYKNAYLKSPWELRAKSLEAKISNKEIAQILLHIAKRRGFKSFRKTDRNADDTGKLLSGIQENKKIMEEKGYLTIGDMVAKDPKFNTHVRNKAGSYLFSFSRKLLEDEVRKIQAKQKELGNTHFTDDVLEKYIEVFNSQRNFDEGPSKPSPYYSEIGQIAKMIGNCTFESSEKRTAKNTWSGERFVFLQKLNNFRIVGLSGKRPLTEEERDIVEKEVYLKKEVRYEKLRKILYLKEEERFGDLNYSKDEKQDKKTEKTKFISLIGNYTIKKLNLSEKLKSEIEEDKSKLDKIIEILTFNKSDKTIESNLKKLELSREDIEILLSEEFSGTLNLSLKAIKKILPYLEKGLSYNEACEKADYDYKNNGIKFKRGELLPVVDKDLIANPVVLRAISQTRKVVNAIIRKYGTPHTIHVEVARDLAKSYDDRQTIIKENKKRELENEKTKKFISEEFGIKNVKGKLLLKYRLYQEQEGRCAYSRKELSLSEVILDESMTDIDHIIPYSRSMDDSYSNKVLVLSGENRKKSNLLPKEYFDRQGRDWDTFVLNVKAMKIHPRKKSNLLKEKFTREDNKDWKSRALNDTRYISRFVANYLENALEYRDDSPKKRVFMIPGQLTAQLRARWRLNKVRENGDLHHALDAAVVAVTDQKAINNISNISRYKELKNCKDVIPSIEYHADEETGEVYFEEVKDTRFPMPWSGFDLELQKRLESENPREEFYNLLSDKRYLGWFNYEEGFIEKLRPVFVSRMPNRGVKGQAHQETIRSSKKISNQIAVSKKPLNSIKLKDLEKMQGRDTDRKLYEALKNRLEEYDDKPEKAFAEPFYKPTNSGKRGPLVRGIKVEEKQNVGVYVNGGQASNGSMVRIDVFRKNGKFYTVPIYVHQTLLKELPNRAINGKPYKDWDLIDGSFEFLYSFYPNDLIEIEFGKSKSIKNDNKLTKTEIPEVNLSEVLGYYRGMDTSTGAATIDTQDGKIQMRIGIKTVKNIKKYQVDVLGNVYKVKREKRQTF

SEQ ID NO: 177 - protein, 994 aa, Streptococcus downei
MENQRGKRQRITHQEPYSIGLDIGTASVGSAVINNDLTVPQKRFKVRDINGNVIKTIKKNMSSVLIFDEANPAKGARTKRTSRRRYTRRNFRLLELKKLFEKEIEKIDPNFFHRIKEDSFFNWNDKEFDKHPLFGNLKEEKKFHNNYPTVFHLRNEIGKNSSKKFDLRLVYLALAHIIKYRGHFLDETFDPDASVSVEKRLNDFIVEYNELFDKDLRSEAKFSEILMSDSSNSVKIESTLSLYPSEKNTIFQVFLKLIVGNQGDFNKFFKDELESSSHSGKLVFSSDEVEDEKEELISIIGEDYLDIINLCQSLYSTVALAKIISTDTGESNTPLSASMVKRYNEHKGDLANLKGIVKHFIPEKYEEVFGEHSKTGYTAYIRNPNKMPEKKFYDYLYHEGEKGKISGILSDSRIYELPAVQKFILKIEQKSFLKKQRTKENGLIPYQLHLKELKIIIENQSEYYPFLHEIEEKLEKLLTFRIPYFVGPLAQTKYINPRFNWLVRKSEDHIKPWNFSEIVDEEKSATKFIEKLISNDQFLFGEKVLPKRSIIYQQFLIFNELTKVSYQIKDGPSRNFDSETKEEIFNSLFKKNKLGCVTVVDLKNYIKNDQCLSEKEDIQIEGIKKKFNSSYSTYADLSEISGLKELLDDDTQLDLVEEIIRILTVFEDKKMRTKQLEKLNLPANVDIEKLCKKHYKGWANVSRQLIDGIADRSRGFKKTILDYLKDDDIPNNDAFSTKVQKSLNRNFAQLITDKSLDFARKLDESYKIDVKKDYPSLVEDIPGSPAIRRAILQSLYTVDEIIGVMGRMPKNIVIEMARTNEVSDSPKTRKERIKKLIKETENDADALNFGISKVSEIFDEVKKDENLFKELEVYLYFLQEGKDMYGTETREGHRQPKEINFYDVKNSTGKYHIDHIIPQSLYSGNPLDNIVLTESTNNKIKDKDVPDEATVYEMKNFWLYLMKKGAISKKKFSFLTKIEQGGLSNEDKFGFINR

SEQ ID NO: 178 - protein, 1052 aa, Aminomonas paucivorans
MIGEHVRGGCLFDDHWTPNWGAFRLPNTVRTFTKAENPKDGSSLAEPRRQARGLRRRLRRKTQRLEDLRRLLAKEGVLSLSDLETLFRETPAKDPYQLRAEGLDRPLSFPEWVRVLYHITKHRGFQSNRRNPVEDGQERSRQEEEGKLLSGVGENERLLREGGYRTAGEMLARDPKFQDHRRNRAGDYSHTLSRSLLLEEARRLFQSQRTLGNPHASSNLEEAFLHLVAFQNPFASGEDIRNKAGHCSLEPDQIRAPRRSASAETFMLLQKTGNLRLIHRRTGEERPLTDKEREQIHLLAWKQEKVTHKTLRRHLEIPEEWLFTGLPYHRSGDKAEEKLFVHLAGIHEIRKALDKGPDPAVWDTLRSRRDLLDSIADTLTFYKNEDEILPRLESLGLSPENARALAPLSFSGTAHLSLSALGKLLPHLEEGKSYTQARADAGYAAPPPDRHPKLPPLEEADWRNPVVFRALTQTRKVVNALVRRYGPPWCIHLETARELSQPAKVRRRIETEQQANEKKKQQAEREFLDIVGTAPGPGDLLKMRLWREQGGFCPYCEEYLNPTRLAEPGYAEMDHILPYSRSLDNGWHNRVLVHGKDNRDKGNRTPFEAFGGDTARWDRLVAWVQASHLSAPKKRNLLREDFGEEAERELKDRNLTDTRFITKTAATLLRDRLTFHPEAPKDPVMTLNGRLTAFLRKQWGLHKNRKNGDLHHALDAAVLAVASRSFVYRLSSHNAAWGELPRGREAENGFSLPYPAFRSEVLARLCPTREEILLRLDQGGVGYDEAFRNGLRPVFVSRAPSRRLRGKAHMETLRSPKWKDHPEGPRTASRIPLKDLNLEKLERMVGKDRDRKLYEALRERLAAFGGNGKKAFVAPFRKPCRSGEGPLVRSLRIFDSGYSGVELRDGGEVYAVADHESMVRVDVYAKKNRFYLVPVYVADVARGIVKNRAIVAHKSEEEWDLVDGSFDFRFSLFPGDLVEIEKKDGAYLGYYKSCHRGDGRLLLDRHDRMPRESDCGTFYVSTRKDVLSMSKYQVDPLGEIRLVGSEKPPFVL

SEQ ID NO: 179 - protein, 1023 aa, Helicobacter cinaedi
MKIYSFDIGVASIGWAFIENEVLQDCGIRIFTKAENPKNGASLALPRREARGVRKRLARRRGRLNTIKQLLCKEFGLQLEDYLSNDGELPKAYTASKANPLKSPYELRTLALSQKLDSKDLVRVILHIAKHRGYGNKHAKDSKDTESGKVKKAIEFNRKTLAEKGYRSVGEYLYREFFQQSRISQNNGATEFINVRNKAGNYEHCVAQDMLKEELESILNAQRQFGFSLKQDFENKLLTKIFEQRPLKSFADKVGNCCFIAGEKRAPKDSPSAIEFIALSRTINTLINLSKESGEIYNRAIILQIVESTLKKGEISYKELREIIRLDERLRFKDPRLDYSREIKEAEKVKFLEFKQLKGFKKALGESFTTLAISQLDEIAEHIALIKDRVKLNEKLESYALTKEQREALSNLSFSAHINLSLQALKQILPFMRGDNGEQCLDYDESVEKAGLKALSKDTLKGQMLPPLNEFEPYLSNPVVARALAEYRKVLNVLLKQYGSPHKIHIEYAREAKLSSTERQKYEKEQKDNYAANQAAHKKCQELGLEPSSTNLLKLKLWQEQGGLCLYSGAKITISYLQDPTALQVDHIYPYSRSFDDSYMNKCLVLTKANQEKGNRTPFEAFGTDSAKWGVITTLAQKLPHKKRRRILNTAFNDKEAGFKLRNLNDTSYIARLVADYTETYLEFLPLVESENTTLSKGQKGSKKHIAIVNGVLTSTMRYYLGFASKDRDNHLHHALDAVIIGFMNDSVIKAFSDFKKTQETSKAAYYAHTLSKQEYKKQRAFIQLPSGENFRVSVLEKVESVFVSKPPRKRVRGALHEATFYSPNDPKLLKNYGGTKGVERALALGKMRKVGAKIVSNGAMVRVDIFRHKSSGKFYGVPVYTMDFALGILPNKAVVVGKDQNGVIKDWLEMDSSYEFIFSLYKDDVILVQKKEMQRPELCYFVSFDTSGASIKVAKHDNNFSTLTENQKLLFSNATKEEVVGKSIGIQNLKVFEKWQVSVLGEVKRTQSYPRENISLASKAKK

SEQ ID NO: 180 - protein, 874 aa, Listeria seeligeri
LANGQSEFSWLTRKADGEIRPWNIEEKVDFGKSAIDFIEKMTNKDTYLPKENVLPKHSMCYQKYMVYNELTKIRYTDDQGKTHYFSGQEKQQIFNDLFKQKRKVKKKDLELFLYNMNHVESPTVEGVEDAFNSSFTTYHDLQKVGVPQEILDDPLNTEMLEEIIKILTVFEDKRMINERLQEFSNVLDEAVLKKLERRHYTGWGRLSAKLLIGIRDKESHLTILDYLMNDDKHNRNLMQLINDSNLSFKSIIEKEQVSTADKDIQSIVADLAGSPAIKKGILQSLKIVDELVGIMGYPPQTIVVEMARENQTTGKGKNNSKPRFTSLEKAIKELGSQILKEHPTDNQGLKNDRLYLYYLQNGKDMYTGQELDIHNLSNYDIDHVVPQSFITDNSIDNRVLASSAANREKGDNVPSLEVVRKRKVYWEKLYQAKLMSKRKFDYLTKAERGGLTEADKARFIHRQLVETRQITKNVANILHQRFNCKKDESGNVIEQVRIVTLKAALVSQFRKQFQLYKVREVNDYHHAHDAYLNCVVANTLLKVYPQLEPEFVYGDYHQFDWFKANKATAKKQFYTNIMLFFAKKDRIIDENGEILWDKKYLDTIKKVLNYRQMNIVKKTEIQKGEFSNATANPKGNSSKLIPRKADWDPIKYGGFDGSNMAYAIVIEHEKRKKKTVIKKELIQINIMERTAFEKDQKEFLEGKGYRNPKVITKIPKYTLYECENGRRRMLGSANEAQKGNQMVLPNHLMTLLYHAKNCEASDGKSLAYIESHREMFAELLDSISEFASRYTLADANLEKINTIFEQNKSGDVKVIAQSFVNLLEFNAMGAPASFKYFETNIERKRYNNLKELLNATIIYQSITGLYEARKRLDD

SEQ ID NO: 181 - protein, 1082 aa, Neisseria lactamica
MAAFKPNPMNYILGLDIGIASVGWAMVEIDKEENPIRLIDLGVRVFERAEVPKTGDSLAMARRLARSVRRLTRRRAHRLLRARRLLKREGVLQDADFDENGLVKSLPNTPWQLRAAALDRKLTCLEWSAVLLHLIKHRGYLSQRKNEGETADKELGALLKGVADNAHALQTGDFRTPAELALNKFEKESGHIRNQRGDYSHTFSRKDLQAELNLLFEKQKEFSNPHVSDSLKEGIETLLMAQRPALSGDAVQKMLGHCTFEPAEPKAAKNTYTAERFIWLTKLNNLRILEQGSERPLTDTERATLMDEPYRKSKLTYAQARKLLGLEDTAFFKGLRYGKDNAEAPTLMEMKAYHAISRALEKEGLKDKKSPLNLSTELQDEIGTAFSLFKTDKDITGRLKDRVQPEILEALLKHISFDKFVQISLKALRRIVPLMEQGKRYDEACAEIYGDHYCKKNAEEKIYLPPIPADEIRNPVVLRALSQARKVINCVVRRYGSPARIHIETAREVGKSFKDRKEIEKRQEENRKDREKAAAKFREYFPNFVGEPKSKDILKLRLYEQQHGKCLYSGKEINLVRLNEKGYVEIDHALPFSRTWDDSFNNKVLVLGSENQNKGNQTPYEYFNGKDNSREWQEFKARVETSRFPRSKKQRILLQKFDEEGFKERNLNDTRYVNRFLCQFVADHILLTGKGKRRVFASNGQITNLLRGFWGLRKVRAENDRHHALDAVVVACSTVAMQQKITRFVRYKEMNAFDGKTIDKETGEVLHQKAHFPQPWEFFAQEVMIRVFGKPDGKPEFEEADTPEKLRTLLAEKLSSRPEAVHEYVTPLFVSRAPNRKMSGQGHMETVKSAKRLDEGISVLRVPLTQLKLKGLEKMVNREREPKLYDALKAQLETHKDNPAKAFAEPFYKYDKAGNRTQQVKAVRIEQVQKTGVWVRNHNGIADNATMVRVDVFEKGGKYYLVPIYSWQVAKGILPDRAVVAFKDEEDWTVMDDSFEFRFVLYANDLIKLTAKKNEFLGYFVSLNRATGAIDIRTHDTDSTKGKNGIFQSVGVKTALSFQKNQIDELGKEIRPCRLKKRPPVR

SEQ ID NO: 182 - protein, 1326 aa, Streptococcus pseudoporcinus
MLGTVLFDSGETAQARRLKRTNRRRYTRRRYRLCQLQNIFATEMVKVDDTFFQRLSESFFYYQDKAFDKHPIFGNSKEERAYHKTYPTIYHLRKDLADRDQKADLRLIYLALSHIIKFRGHFLIEGKLNSENTDVQKLFIALVTVYNLLFEEEPIAGETCDAKALLTAKTSKSKRLESLISEFPGQKKNGLFGNLLALALGLRPNFKSNFGLSEDAKLQITKDTYEEELDNLLAEIGDHYADLFLAAKNLSDAILLSDILTLSDENTRAPLSASMIKRYEEHQEDLALLKKLVKEQMPEKYWEIFSNAKKNGYAGYIEGKVSQEDFYRYIKPILSRLKGGDEFLAKIDRDDFLRKQRTFDNGSIPHQIHLKELHAILRRQEKYYPFLAEQKEKIEQLLCFRIPYYVGPLAKGGNSSFAWLKRRSDEPITPWNFKDVVDEEASAQAFIEGMTNYDTYLPEEKVLPKHSPLYEMFTVYNELTKVKYIAENMTKPLYLSAEQKEAIIDHLFKQTRKVTVKDLKEKYFSQIEGLENVDVTGVEGAFNASLGTYNDLLKIIKDKAFLDDEANAEILEEIVLILTLFQDEKLIEKRLAKYANLFEKSVLKKLRKRHYRGWGRLSRQLIDGMKDKASGKTILDFLKADDFANRNFIQLINDSSLDFEKLIDDAQKKAIKRESLTEAVANLAGSPAIKKGILQSLKVVDEIVKVMGHNPDNIVIEMSRENQTTAQGLKNARQRLKKIKEVHKKTGSRILEDNSERITNLTLQDNRLYLYLLQDGKDMYTGQDLDINNLSQYDIDHIIPQSFIKDNSIDNLVLTTQKANRGKSDNVPSIEVVRDMKDRVWRRQLANGAISRQKFDHLTKAERGGLADSDKARFLRRQLVETRQITKHVAQLLDSRFNSKSNQNKKLARNVKIITLKSKIVSDFRKDFGLYKLREVNNYHHAHDAYLNAVVGTALLKKYPKLEAEFVYGDYKHFDLVKLISKSDPSLGKATAKVFFYSNIMNFFKEELSLADGTLMKRPVIETNTETGEVVWDKVKDFKTIRKVLSYPQVNIVKKTEIQSGAFSKESVLSKGNSDKLIERKKGWDPKKYGGFDSPNTAYSIFVVAKVAKRKAQKLKTVKEIVGITIMEQAEYEKDNIAFLEKKGYQDIQEKLLIKLPKYSLFELENGRRRLLASANEFQKGNELALSGKYMKFLYLASRYDKLSSKIESEQQKKLFVEQHLHYFDEILDIVVKHATCYIKAENNLKKIISLYKKKEAYSINEQALNMLNLFIFTSLGAPSTFVFFDETIDRKRYTTSSDVLNGILIQQSITGLYETRIDLSRFGGD

SEQ ID NO: 183 - protein, 1150 aa, Enterococcus faecalis
MYSIGLDLGISSVGWSVIDERTGNVIDLGVRLFSAKNSEKNLERRTNRGGRRLIRRKTNRLKDAKKILAAVGFYEDKSLKNSCPYQLRVKGLTEPLSRGEIYKVTLHILKKRGISYLDEVDTEAAKESQDYKEQVRKNAQLLTKYTPGQIQLQRLKENNRVKTGINAQGNYQLNVFKVSAYANELATILKTQQAFYPNELTDDWIALFVQPGIAEEAGLIYRKRPYYHGPGNEANNSPYGRWSDFQKTGEPATNIFDKLIGKDFQGELRASGLSLSAQQYNLLNDLTNLKIDGEVPLSSEQKEYILTELMTKEFTRFGVNDVVKLLGVKKERLSGWRLDKKGKPEIHTLKGYRNWRKIFAEAGIDLATLPTETIDCLAKVLTLNTEREGIENTLAFELPELSESVKLLVLDRYKELSQSISTQSWHRFSLKTLHLLIPELMNATSEQNTLLEQFQLKSDVRKRYSEYKKLPTKDVLAEIYNPTVNKTVSQAFKVIDALLVKYGKEQIRYITIEMPRDDNEEDEKKRIKELHAKNSQRKNDSQSYFMQKSGWSQEKFQTTIQKNRRFLAKLLYYYEQDGICAYTGLPISPELLVSDSTEIDHIIPISISLDDSINNKVLVLSKANQVKGQQTPYDAWMDGSFKKINGKFSNWDDYQKWVESRHFSHKKENNLLETRNIFDSEQVEKFLARNLNDTRYASRLVLNTLQSFFTNQETKVRVVNGSFTHTLRKKWGADLDKTRETHHHHAVDATLCAVTSFVKVSRYHYAVKEETGEKVMREIDFETGEIVNEMSYWEFKKSKKYERKTYQVKWPNFREQLKPVNLHPRIKFSHQVDRKANRKLSDATIYSVREKTEVKTLKSGKQKITTDEYTIGKIKDIYTLDGWEAFKKKQDKLLMKDLDEKTYERLLSIAETTPDFQEVEEKNGKVKRVKRSPFAVYCEENDIPAIQKYAKKNNGPLIRSLKYYDGKLNKHINITKDSQGRPVEKTKNGRKVTLQSLKPYRYDIYQDLETKAYYTVQLYYSDLRFVEGKYGITEKEYMKKVAEQTKGQVVRFCFSLQKNDGLEIEWKDSQRYDVRFYNFQSANSINFKGLEQEMMPAENQFKQKPYNNGAINLNIAKYGKEGKKLRKFNTDILGKKHYLFYEKEPKNIIK

SEQ ID NO: 184 - protein, 1150 aa, Enterococcus faecalis
MYSIGLDLGVSSVGWSVIDERTGNVIDLGVRLFSAKNSEKNLERRTNRGGRRLIRRKTNRLKDAKKILAAVGFYEDKSLKNSCPYQLRVKGLTEPLSKGEIYKVTLHILKKRGISYLDEDDTEAAKESQDYKEQVRENAQLLTKYTPGQIQLQRLKENNRVKTGINAQGNYQLNVFKVSAYANELATILKTQQAFYPNELTDDWIALFVQPGIAEEAGLIYRKRPYYHGPGNEANNSPYGRWSDFKKTGQPATNIFDKLIGKDFQGELRASGLSLSAQQYNLLNDLTNLKIDGEIPLSPEQKEYILAELMTKEFTRFGINDVAKLLGVKKERLSGWRLDKKGKPEIHTLKGYRNWRKIFAESGIDLATLPTETIDCLAKVLTLNTEREGIENTLAFELPELAESVKLLVLDRYKELSQSVSTQAWHRFSLKTLHLLIPELMNATSEQNTLLEQFQLKSDVRKRYSEYKKLPTKDVLTEIYNPTVNKTVSQAFKVIDALLVKYGKEQIRYITIEMPRDDNEEDEKKRIKELHAKNSQRKNDSQSYFMQKSGWSQEKFQTTIQKNRRFLAKLLYYYEQDGICAYTGLSISPELLVSDSTEIDHIIPISISLDDSINNKVLVLSKANQVKGQQTPYDAWMDGSFKKINGKFSNWDDYQKWVESRHFSHKKENNLLETRNIFDSEQVEKFLARNLNDTRYASRLVLNTLQSFFANQETKVRVVNGSFTHTLRKKWGADLDKTRETHHHHAVDATLCAVTPFVKVSRYHYAVKEETGEKVMREIDFETGEIVDEMSYREFKKSKKYERKTYQVKWPNFREQLKPVNLHPRIKFSHQVDRKANRKLSDATIYSVREKTEVKTLKSGKQKITTDEYTIGKIKDIYTVDGWEAFKKKQDKLLMKDLDEKTYERLLSIAETTPDFQEVEEKNGKVKRVKRSPFAVYCEENDIPAIRKYAKNNNGPLIRSLKYYDGKLNKHINITKDSQGRPVEKTKNGRKVTLQSLKPYRYDIYQDLETKAYYTVQLYYSDLRFVEGKYGITEKEYMKKVAEQTKGQVVRFCFSLQKNDGLEIEWKDSQCYDVRFYNFQSANSINFKGLEQEMMPAENQFKQKPYNNGAINLNIAKYGKEGKKLRKFNTDILGKKHYLYYEKEPKNIIK

SEQ ID NO: 185 - protein, 1345 aa, Streptococcus anginosus
MDQKYSIGLDIGTNSVGWAVVTDDYKVPAKKMKVLGNTDKQSIKKNLLGALLFDSGETAEATRLKRTARRRYTRRRNRLRYLQEIFAEEMNKVDENFFQRLDDSFLVDEDKRGERHPIFGNIAAEVKYHDDFPTIYHLRKHLADISQKADLRLVYLALAHMIKFRGHFLIEGQLKAENTNVQALFKDFVEVYDKTVEESHLSEMTVDALSILTEKVSKSRRLENLIAHYPAEKKNTLFGNLIALSLGLQPNFKTNFQLSEDAKLQFSKDTYEEDLEGLLGEIGDEYADLFASAKNLYDAILLSGILTVDDNSTKAPLSASMVKRYEEHQKDLKKLKDFIKVNAPDQYNAIFKDKNKKGYAGYIENGVKQDEFYKYLKGILLQINGSGDFLDKIDREDFLRKQRTFDNGSIPHQIHLQEMHAILRRQEEHYPFLKENQDKIEKILTFRIPYYVGPLARKGSRFAWAEYKADEKITPWNFDDILDKEKSAEKFITRMTLNDLYLPEEKVLPKHSLLYETFTVYNELTKVKYVNEQGEAKFFDANMKQEIFDHVFKENRKVTKDKLLNYLNKEFEEFRIVNLTGLDKENKAFNSSLGTYHDLRKILDKSFLDDKANEKTIEDIIQTLTLFEDREMIRQRLQKYSDIFTKAQLKKLERRHYTGWGRLSYKLINGIRNKENKKTILDYLIDDGYANRNFMQLINDDALSFKEEIARAQIIGDVDDIANVVHDLPGSPAIKKGILQSVKIVDELVKVMGHNPANIIIEMARENQMTDKGRRNSQQRLKLLQDSLKNLDNPVNIKNVENQQLQNDRLFLYYIQNGKDMYTGETLDINNLSQYDIDHIIPQAFIKDNSLDNRVLTRSDKNRGKSDDVPSIEVVHEMKSFWSKLLSVKLITQRKFDNLTKAERGGLTEEDKAGFIKRQLVETRQITKHVAQILDERFNTEFDGNKRRIRNVKIITLKSNLVSNFRKEFELYKVREINDYHHAHDAYLNAVVGNALLLKYPQLEPEFVYGEYPKYNSYRSRKSATEKFLFYSNILRFFKKEDIQTNEDGEIAWNKEKHIKILRKVLSYPQVNIVKKTEEQTGGFSKESILPKGESDKLIPRKTKNSYWNPKKYGGFDSPVVAYSILVFADVEKGKSKKLRKVQDMVGITIMEKKRFEKHPVDFLEQRGYRNVRLEKIIKLPKYSLFELENKRRRLLASARELQKGNELVIPQRFTTLLYHSYQIEKNYEPEHREYVEKHKDEFKELLEYISVFSRKYVLADNNLTKIEMLFSKNKDAEVSSLAKSFISLLTFTAFGAPAAFNFFGENIDRKRYTSVTECLNATLIHQSITGLYETRIDLSKLGED

SEQ ID NO: 186 - protein, 849 aa, Listeria ivanovii
  misc_feature (780)..(780): Xaa can be any naturally occurring amino acid
LIDKNGTPQHITMIDKMRGKCTYFPEEVRIAKMSYTAELFGLLNDFNNIYFADPETGEKIGFTEADKKYFIDTFIHDQKGVKNITLKQIMKHKNIINETDIFGYRINTKNGTPIFTEFKGLKALKKALKEVDLPDEFYQNTEMMDEIANILSSEKSFTRREEQLKELFLAAFNDELEEAVKELINDITFKEFHSLSKKAIMVILPELWSTNQNQMQLFVQHKMDKSRLENLQNGTKIQFDDEAILSTIAKRAHRETIKIVDAVRAKYGELDYVIVEMAREKNSDEQKKVYNRAQKKQGDFEKEMCKLLGVSELKELRLNGKQHLALKFWKEQDGKCIYSGKPIALSDIVNNFNGLLEIDHIIPISISYDDSQQNKVLCLRSENQRKGQLSPYQYLIRGMGERSFDAFKAEVLSRHFGKKKQNYLLEMEDIANNDELRKHFINRNLVDTRYAMRTFSNTLKTFYTVNGIPTKVMPVNGAMTSALRKRAKLNKDRDAGHAHHAIDALIVAAIGRLPLIKQLAELRVNEEGEFADKITDKGLDDKTAFDDKTLKFLRNLLNYESKVKYSHKVDRKPNRSLSKQTLYSTREKDGEKYIIGKVKNIYTLDKAGYAALKKRIDKNPEDFLMAQHNPKTWEEIIKIMEVYSKADNPFKEFYDEHGFIMKDGKVPVKSLRYHDKKLGIHVPLTHKYENTRHDVVLLKRNSLRVDIYMNKEGVYKYQGVPYNWFNQKGDKYILDMEKYHNEIDGTRASFKNIDNTFEFQFSLYKNDVFSYMKKDKEGEXVSYTKLFRSDSSPRENRLEVENIDMRTSSQQMPTINPLKNLIKYNTDILGNTYPIQKEKFVTVFTLHSK

SEQ ID NO: 187 - protein, 1457 aa, Prevotella buccae
MKTILGLDLGTNSIGWAKVSVDDYGNYLHDIKLGSRIIPMSQDVLGNFDSGVTVSQTAQRTEFRSKRRLVQRNLQRRERLHRVLHVLDFLPAHYDAAIGWDRTEAVTYGKFLNHAEPKLAWEELGNGKRRFLFMDSFHEMVADFARCQPALVADGKKIPLDWTIYYLRKKALTQAITKEELAWILLNFNQKRGYYQLRGEEEEENPTKQEEYYELKVVSVEATDSRKGNDTWYNVHLENGWIYRRSSKISLDDWVGKVKQFIVTTEYEKDGATLKTDKEGYVKRSFRAPNENDWGLRKKRTETLLEMSGKTVGAFIYDHLLQEPADKIRGNFIRTIERHYYKAELEAILAEQCKYHIELRDKEMLEACARELYLNNLPHQRSLMKKDMTYLLLYDLIFYQRPLKSKKALIANCPYEYYEYVDKETGEIKRQNIKCIAKSNPYFQEFRLWQFVLNLRLFDRVEDKEVTANYLPTADDHARLFTYLNDRKEINQETLLKDYFKLKKVKIGNEKEYPIRWNYIEDKEKKYPCNETRYELLMALDRAGIEHKWLDDNNLEYRLWHLLYSVEVKSESETALRKLKNDDAFVNSFLKVKPFKKEYGAYSEKAIKRLLAVMRKGFLWNEQDICDETRKRIEIIIKGDVDEKVKERMGHAAYSFDRVSDFQGLPEWLACYVVYGRHSEAMDIQHWDSPERLMAYINNFKQYSLRNPIVEQCILETLRTVHDIWKETGQIDEIHVELGREMKSTSEERARRTQNVLRNENTNLRIKSLLIELKNDTDICNVHPYSPMQQEILRIYEEGALQELNREDEDFEEISKISQMSQPSGKELNRYKLWLEQKYRSPYTGKAISLAKLFTPAYQIEHVIPQSRYFDDSFTNKVICEAEVNTLKSNLLGYEFIKKHGGEIIHCTTLGDVRIFSESEYKAFVMDHYANNKSKKDKLLMEDIPQEFLSRQMNDSRYISKVVKTLLSNIVRMADESEATSKSVIVCTGGVTDRLKKDWGLNDVWNSIVYSRFERLNRLTGTEAFGHWENKDGKRVFQTSMPLELQRGFRKKRIDHRHHAMDALVIACASRNIVNYLNNESANNPKKREDLRRQLCDKNRVIRKPWETFTQDAYNALENVVVSFKNYVRVINKATNRYEHYDENGKKRFVQQKGSELWAIRKPMHKETYYGHVNLRRKELVTLQKALDDIPSICDKKLRDYISALVEKHFNKRQLLAHFKSTDYYWQKQYVNKVYVWTFSDDIKPLVATRKLLDTSFDAKRIGTITDTGIQKILRNYLEAKGGNATLAFTPEGIAEMNQNISKYNDGKPHQPILKVRITEPMGAKYRVGQTGNKMAKYVEAQSGTNLYFAIYEDSEGKRSYTTVPLDEVAERLKQRLSPVPEKDENDVPLKFYLSPNDLVYVPTEEELQLRECKLNKDRIYKMVSSTGNECHFIPYYVANVIYNKGGFNMQMHRPQS

SEQ ID NO: 188 - protein, 1330 aa, Enterococcus italicus
MKNDYTIGLDIGTNSVGYSVVTDDYKVISKKMNVFGNTEKKSIKKNFWGVRLFESGQTAQEARMKRTSRRRIARRKNRICYLQEIFQPEMNHLDNNFFYRLNESFLVADDAKYDKHPIFGTLDEEIHFHEQFPTIYHLRKYLADGDEKADLRLVYLAIAHIIKFRGNFLIEGELNTENNSVIELSKVFVQLYNQTLSELEGFQFIDESIDFSEVLTQQLSKSERADNVLKLFPDEKGTGIFAQFIKLIVGNQGNFKKVFQLEEDQKLQLSTDDYEENIENLLAIIGDEYGDIFVAAQNLYQAILLAGILTSTEKTRAKLSASMIQRYEEHAKDLKLLKRFVKEHIPDKYAEIFNDATKNGYAGYIDGKTKEEEFYKYLKTTLVQKSGYQYFIEKIEQENFLRKQRIYDNGVIPHQVHAEELRAILRKQEKYYSFLKENHEKIEQIFKVRIPYYVGPLAKHNEQSRFAWNIRKSDEPIRPWNMNDVVDENASAVAFIERMTIKDIYLNENVLPRHSLIYEKFTVFNELTKVLYADDRGVFQRFSAEEKEDIFEKLFKSERKVTKKKLENYLRIELSISSPSVKGIEEQFNANFGTYLDLKKFDELHPYLDDEKYQDTLEEVIKVLTVFEDRSMIQNQLEQLPLNLSTKTIKALSRRKYTGWGRLSARLIDGIHDKNSGKTILDYLIEDESDSYIVNRNFMQLINDDHLSFKKIIEDSQPYKEQQSAEEIVSELSGSPAIKKGILQSLKIVDELVAIMGYKPKNIVVEMARENQTTGRGKQNSKPRLKGIENGLKEFSDSVLKGSSIDNKQLQNDRLYLYYLQNGKDMYTGHELDIDHLSTYDIDHIIPQSFLTDNSIDNRVLTTSKSNRGKSDNVPSEEVVRKMDRFWRKLLNAKLISERKYTNLTKKELTESDKAGFLKRQLVETRQITKHVATILDSKFNEDSNNRDVQIITLKSALVSEFRKTFNLYKVREINDLHHAHDAYLNAVVALSLLRVYPQLKPEFVYGEYGKNSIHDQNKATIKKQFYSNITRYFASKDYIINDDGEILWNKQETIAQVIKTLGMHQVNVVKKVEIQKGGFSKESIQPKGESQKLIRRKQQWNTKKYGGFDSPVVAYAILLSFDKGKRKARSFKIVGITIQDRESFEGNPILYLSKKDYHNPKVEAILPKYSLFEFENGRRRMVASASETQKGNQLIIPGHLMELLYHSKKIINGKNSDSVSYIQNNKEKFREIFEYIVDFSSKYISADANLNKIEKIFENNFHKASEQEIAKSFINLLTFTAMGAPADFEFFGEKIPRKRYVSISEIIDAVFIHQSITGLYETRVRLTEV

SEQ ID NO: 189 - protein, 1123 aa, Mobiluncus curtisii
MFVYLNSPRGFGPATFLTDLPHFCIIFGNNDFMDNRKYHVGIDVGTNSVGFAAVEVGDSGSPIRFLNTMVVIHDSGVDPEQKKYAITRLASAGTARRTRRLYRTRRQRLRELDDFISNELGYPLVNLENFADPYEPWKVRADLATIKLPADELPEAMSIALRHMARHRGWRSPYQRVEALHLHAEISEEFSALKKRVMEKTGDVFSDDATPAEVLVDLMGRQKIRGADGMLSGKLRQSDNANELRKIASVQGIDDETLNRIIDRVFFSRSPKGKASERVGMDALPGQGSKPRALKAMPSFQKFRIVSVICNLRIKDSGDDNRPLSMEEKEQLIGYLMSSTTDDHVTWTDVAELLHVKRSNLQGTAKEGPDGERPYTRPPVNSAWSKIKDSKIKSLVALWKTGDVDVQSAIVEALSNASVLEDARPGADIVVAYLESLDDKELESLDKVGLPAGRASYSEDSLERLTERMLQDDCDLFEARKREFGVSDDWKPPADPIYAPVGNPGVDRVLKIVNRLLMAAEREWGAPTQINIEHVRSGFSSELMQREFERENERRRAQNEEAVKAILTEKGGNSHVSKYDIIRYYAVKRQNCQCLYCGTPITFSDCELDHIVPRKGVGSTNSRVNLAAACRSCNRDKSNLPFAVWAGKTSNFDVSIDGAVSRVKQWQRSQNEGAREFRAFQNEVISRLLKTTEDPEIDSRSLESVAWMARELHHRVEYYFQSKGAQTQVSVYRGAVTAQARKSSGLEDKVKMIGGGGKTRLDRRHHAMDAATIALMTPGISTTLSEKNNLRDAQKFTGQSETWKDYCGRTETAREHFAVWKSNMERLTDLFNDKLENDAIPVVQPLRLRLSDSKAHDDGIGKLDSKKLGSVWSLADIDRAATPQIWTALTRCDDFDPTKGLPENANRVIRAQGVKYESEDNIPVFPSNVAAIAVRDGYAEIGSTIHHARIYRIDDGKKIFYSMIRVFAVDLLKHQAEDLFTVKLPPSAISIRTCEDSLRRALSNGTAEYLGWLVPGDEIIVDTSDKAFHTGQIGDLLRNFPVNSFRLTGFPSNSRLRLKPVLLAGEGLRDDAEDSIKKILSGQGWRPAINVLFSKGKPRIVRRNSLGIERPSSNNGLPFSWEA

SEQ ID NO: 190 - protein, 1054 aa, Staphylococcus lugdunensis
MNQKFILGLDIGITSVGYGLIDYETKNIIDAGVRLFPEANVENNEGRRSKRGSRRLKRRRIHRLERVKKLLEDYNLLDQSQIPQSTNPYAIRVKGLSEALSKDELVIALLHIAKRRGIHKIDVIDSNDDVGNELSTKEQLNKNSKLLKDKFVCQIQLERMNEGQVRGEKNRFKTADIIKEIIQLLNVQKNFHQLDENFINKYIELVEMRREYFEGPGKGSPYGWEGDPKAWYETLMGHCTYFPDELRSVKYAYSADLFNALNDLNNLVIQRDGLSKLEYHEKYHIIENVFKQKKKPTLKQIANEINVNPEDIKGYRITKSGKPQFTEFKLYHDLKSVLFDQSILENEDVLDQIAEILTIYQDKDSIKSKLTELDILLNEEDKENIAQLTGYTGTHRLSLKCIRLVLEEQWYSSRNQMEIFTHLNIKPKKINLTAANKIPKAMIDEFILSPVVKRTFGQAINLINKIIEKYGVPEDIIIELARENNSKDKQKFINEMQKKNENTRKRINEIIGKYGNQNAKRLVEKIRLHDEQEGKCLYSLESIPLEDLLNNPNHYEVDHIIPRSVSFDNSYHNKVLVKQSENSKKSNLTPYQYFNSGKSKLSYNQFKQHILNLSKSQDRISKKKKEYLLEERDINKFEVQKEFINRNLVDTRYATRELTNYLKAYFSANNMNVKVKTINGSFTDYLRKVWKFKKERNHGYKHHAEDALIIANADFLFKENKKLKAVNSVLEKPEIESKQLDIQVDSEDNYSEMFIIPKQVQDIKDFRNFKYSHRVDKKPNRQLINDTLYSTRKKDNSTYIVQTIKDIYAKDNTTLKKQFDKSPEKFLMYQHDPRTFEKLEVIMKQYANEKNPLAKYHEETGEYLTKYSKKNNGPIVKSLKYIGNKLGSHLDVTHQFKSSTKKLVKLSIKPYRFDVYLTDKGYKFITISYLDVLKKDNYYYIPEQKYDKLKLGKAIDKNAKFIASFYKNDLIKLDGEIYKIIGVNSDTRNMIELDLPDIRYKEYCELNNIKGEPRIKKTIGKKVNSIEKLTTDVLGNVFTNTQYTKPQLLFKRGN

SEQ ID NO: 191 - protein, 586 aa, Pseudoramibacter alactolyticus
MTYYLGLDMGTGSVGWAATDKNYKLIRAKGKDLWGVRLFQTAKTAAERRSHRVARLRRQREKVRIGYLKTIFSDAINKVDPGFFQRLDDSFFYAEDKNINQPYALFADTGYTDVDYYRDYPTIFHLRSTLIHDTSPKDVRLVYLAVLNMFKHRGHFLASNLSENGVDDFGDIYQQWCKSVPKPVQISDPEAKTEKIENILSKAGISNTRRLEALLEVFGIKRRDAFAEVLKLWCGLKGNLSKIWSETDFSDLDNTKPALSFKDSNLDMVLSQLEEILPDEDYSWLMLTKQIYDWSLLSGMMKDASGKSYDYLSDARVASYQKHSEDLKTLKRFYHDNHLSAAYDQMFRVMGKDNYSAYAGSVQSKKEVVRRGASCGIEELYKRIKKDLKPVPDCETKQIILENIERGTFLPKQLTRDNGVIPNQIHVHELKAILKNAENYLPFLKEGSELTNSEKILQLFQFQIPYYVGPLYSDENNYAWVVRKEGGRVFPWNFAEKVDEKASAEGFISELVARCTYLDNEKVLPKASLLYEKFMVLNELNNLRINGERISVDIKQELYQNLFTRGKKVTLKKSEGLFGGQRIFCL

SEQ ID NO: 192 - protein, 1385 aa, Gemella morbillorum
MKNKTWYLGLGVGPTSIGWAATDSNYKLLRKNKKRLWGVRLFEEAKTAVDRRTFRAERRRLARRKWRISLLEELFAKEVSKNDPNFFLRLKESKYHFEDKSLMNEYILFNDKDYTDKDYYKEYPTIYHLRLSLTTEENPDIRKVYLAVHSMLKNRGHFLLQGQSFNDSNIDSVIKELLELETVKINFEVTDEVIHSLKKIALEKKNLSDKNNDVKKLYPKEKQLQEIFKLVFGGKTSLDKLYDIEEYKELDNSVKSISFKEKVYEEVRPDYEQILSNYIELLDLAKLVYDSIVLADIKKEGKTISESKVELYNKHKDDLANLKKLVKIDSKLSEDKKKEVYFTIFKEDKEKGTNYVNYTHRSQEGKSCSYEDFKKFLKKELEKLEDSPTKTTILEELDLETFLPLQRTKDNSVVPYQIHKEELVKILDNAAKYHSFLAEKDDSGYSTREKVVQLFEFRIPYYIGPLNAHHNTENGGYSWAIRKKGMESVPVTPWNFKDVIDESASAEAFVNNLKNKCAYLSGEDVLPKNSLLYSEYALLNELNALRYEGNRISVEARDVIVTKLFKEQGKKVTKKTIKELLKTEGFIDGKGEIVGIDNIVKNDLKSYRDFKKILADKFDKERVENIILWITLYGESRKLIKEKITKVYGDFYTVDEIEKMSRLTYKDWGILSRKLLTELVSEKLYNEETGECLNIIGAMRQGTILFMELLADKFDYMSQIKNHNKENKDDITEITPDILENLHASPAVKRSIWQTVRIVEELKTIIGCVPTKIFIETTKRNNAPYKVPTLNRNDLVTKYKTIREHEIFELEKELKNTLDFTLNKNRLINEEPSKLKATKLYLYYTQLGRCMYTGKKIDLGELFDNNNKYDIDHIYPQSKVKDGSFNNIVLVTKASNDMKADVFPLKSKFQTKENKIFWRFLKEKKLITEEKYNRLVRTEEFSNGELTGFITRQLVETSQAIKVISNVLRELNPETTICYSKAENVSSFRQSFGKIKEANRKAENNEKLIRVQEINDYYNAKDAYLSIVVGNVYDVKFTRNVHNFIKNNKDARRYSLNGLFYTDVKNANTIAWEMDKTVHVVEKTMNNNNILITRRTSEQKGALYDATLYKAKVAEKAKEGTYYPLKTTDSKIKDVGKYGGFTKIKIAYYSIFEYTLDGKKGKQKITRIVPIPIYISQNIKDDKALLEYAQTRLPGKDLKIKYRKLCIGSLVKINNFNYYIGGKTNNNFTFDSAVQVILDKDSESYIKELAKYLNWKKENKDGKLWESITEDKNIQLYDSLVKKMNTGIFIRKTPNKYTELLTLEVKNKFINIDIDEQVKLLLEILNLLTNKKFTSKLNEIGITASRGVCSFNLSNQSQFSIIEQSVTGVYEKEKLIIEKKKEGIL

SEQ ID NO: 193 - protein, 1029 aa, Alicycliphilus denitrificans
MRSLRYRLALDLGSTSLGWALFRLDACNRPTAVIKAGVRIFSDGRNPKDGSSLAVTRRAARAMRRRRDRLLKRKTRMQAKLVEHGFFPADAGKRKALEQLNPYALRAKGLQEALLPGEFARALFHINQRRGFKSNRKTDKKDNDSGVLKKAIGQLRQQMAEQGSRTVGEYLWTRLQQGQGVRARYREKPYTTEEGKKRIDKSYDLYIDRAMIEQEFDALWAAQAAFNPTLFHEAARADLKDTLLHQRPLRPVKPGRCTLLPEEERAPLALPSTQRFRIHQEVNHLRLLDENLREVALTLAQRDAVVTALETKAKLSFEQIRKLLKLSGSVQFNLEDAKRTELKGNATSAALARKELFGAAWSGFDEALQDEIVWQLVTEEGEGALIAWLQTHTGVDEARAQAIVDVSLPEGYGNLSRKALARIVPALRAAVITYDKAVQAAGFDHHSQLGFEYDASEVEDLVHPETGEIRSVFKQLPYYGKALQRHVAFGSGKPEDPDEKRYGKIANPTVHIGLNQVRMVVNALIRRYGRPTEVVIELARDLKQSREQKVEAQRRQADNQRRNARIRRSIAEVLGIGEERVRGSDIQKWICWEELSFDAADRRCPYSGVQISAAMLLSDEVEVEHILPFSKTLDDSLNNRTVAMRQANRIKRNRTPWDARAEFEAQGWSYEDILQRAERMPLRKRYRFAPDGYERWLGDDKDFLARALNDTRYLSRVAAEYLRLVCPGTRVIPGQLTALLRGKFGLNDVLGLDGEKNRNDHRHHAVDACVIGVTDQGLMQRFATASAQARGDGLTRLVDGMPMPWPTYRDHVERAVRHIWVSHRPDHGFEGAMMEETSYGIRKDGSIKQRRKADGSAGREISNLIRIHEATQPLRHGVSADGQPLAYKGYVGGSNYCIEITVNDKGKWEGEVISTFRAYGVVRAGGMGRLRNPHEGQNGRKLIMRLVIGDSVRLEVDGAERTMRIVKISGSNGQIFMAPIHEANVDARNTDKQDAFTYTSKYAGSLQKAKTRRVTISPIGEVRDPGFKG

SEQ ID NO: 194 - protein, 1422 aa, Sutterella wadsworthensis
MTQSERRFSCSIGIDMGAKYTGVFYALFDREELPTNLNSKAMTLVMPETGPRYVQAQRTAVRHRLRGQKRYTLARKLAFLVVDDMIKKQEKRLTDEEWKRGREALSGLLKRRGYSRPNADGEDLTPLENVRADVFAAHPAFSTYFSEVRSLAEQWEEFTANISNVEKFLGDPNIPADKEFIEFAVAEGLIDKTEKKAYQSALSTLRANANVLTGLRQMGHKPRSEYFKAIEADLKKDSRLAKINEAFGGAERLARLLGNLSNLQLRAERWYFNAPDIMKDRGWEPDRFKKTLVRAFKFFHPAKDQNKQHLELIKQIENSEDIIETLCTLDPNRTIPPYEDQNNRRPPLDQTLLLSPEKLTRQYGEIWKTWSARLTSAEPTLAPAAEILERSTDRKSRVAVNGHEPLPTLAYQLSYALQRAFDRSKALDPYALRALAAGSKSNKLTSARTALENCIGGQNVKTFLDCARRYYREADDAKVGLWFDNADGLLERSDLHPPMKKKILPLLVANILQTDETTGQKFLDEIWRKQIKGRETVASRCARIETVRKSFGGGFNIAYNTAQYREVNKLPRNAQDKELLTIRDRVAETADFIAANLGLSDEQKRKFANPFSLAQFYTLIETEVSGFSATTLAVHLENAWRMTIKDAVINGETVRAAQCSRLPAETARPFDGLVRRLVDRQAWEIAKRVSTDIQSKVDFSNGIVDVSIFVEENKFEFSASVADLKKNKRVKDKMLSEAEKLETRWLIKNERIKKASRGTCPYTGDRLAEGGEIDHILPRSLIKDARGIVFNAEPNLIYASSRGNQLKKNQRYSLSDLKANYRNEIFKTSNIAAITAEIEDVVTKLQQTHRLKFFDLLNEHEQDCVRHALFLDDGSEARDAVLELLATQRRTRVNGTQIWMIKNLANKIREELQNWCKTTNNRLHFQAAATNVSDAKNLRLKLAQNQPDFEKPDIQPIASHSIDALCSFAVGSADAERDQNGFDYLDGKTVLGLYPQSCEVIHLQAKPQEEKSHFDSVAIFKEGIYAEQFLPIFTLNEKIWIGYETLNAKGERCGAIEVSGKQPKELLEMLAPFFNKPVGDLSAHATYRILKKPAYEFLAKAALQPLSAEEKRLAALLDALRYCTSRKSLMSLFMAANGKSLKKREDVLKPKLFQLKVELKGEKSFKLNGSLTLPVKQDWLRICDSPELADAFGKPCSADELTSKLARIWKRPVMRDLAHAPVRREFSLPAIDNPSGGFRIRRTNLFGNELYQVHAINAKKYRGFASAGSNVDWSKGILFNELQHENLTECGGRFITSADVTPMSEWRKVVAEDNLSIWIAPGTEGRRYVRVETTFIQASHWFEQSVENWAITSPLSLPASFKVDKPAEFQKAVGTELSELLGQPRSEIFIENVGNAKHIRFWYIVVSSNKKMNESYNNVSKS

SEQ ID NO: 195 - protein, 1132 aa, Nitratifractor salsuginis
MKKILGVDLGITSFGYAILQETGKDLYRCLDNSVVMRNNPYDEKSGESSQSIRSTQKSMRRLIEKRKKRIRCVAQTMERYGILDYSETMKINDPKNNPIKNRWQLRAVDAWKRPLSPQELFAIFAHMAKHRGYKSIATEDLIYELELELGLNDPEKESEKKADERRQVYNALRHLEELRKKYGGETIAQTIHRAVEAGDLRSYRNHDDYEKMIRREDIEEEIEKVLLRQAELGALGLPEEQVSELIDELKACITDQEMPTIDESLFGKCTFYKDELAAPAYSYLYDLYRLYKKLADLNIDGYEVTQEDREKVIEWVEKKIAQGKNLKKITHKDLRKILGLAPEQKIFGVEDERIVKGKKEPRTFVPFFFLADIAKFKELFASIQKHPDALQIFRELAEILQRSKTPQEALDRLRALMAGKGIDTDDRELLELFKNKRSGTRELSHRYILEALPLFLEGYDEKEVQRILGFDDREDYSRYPKSLRHLHLREGNLFEKEENPINNHAVKSLASWALGLIADLSWRYGPFDEIILETTRDALPEKIRKEIDKAMREREKALDKIIGKYKKEFPSIDKRLARKIQLWERQKGLDLYSGKVINLSQLLDGSADIEHIVPQSLGGLSTDYNTIVTLKSVNAAKGNRLPGDWLAGNPDYRERIGMLSEKGLIDWKKRKNLLAQSLDEIYTENTHSKGIRATSYLEALVAQVLKRYYPFPDPELRKNGIGVRMIPGKVTSKTRSLLGIKSKSRETNFHHAEDALILSTLTRGWQNRLHRMLRDNYGKSEAELKELWKKYMPHIEGLTLADYIDEAFRRFMSKGEESLFYRDMFDTIRSISYWVDKKPLSASSHKETVYSSRHEVPTLRKNILEAFDSLNVIKDRHKLTTEEFMKRYDKEIRQKLWLHRIGNTNDESYRAVEERATQIAQILTRYQLMDAQNDKEIDEKFQQALKELITSPIEVTGKLLRKMRFVYDKLNAMQIDRGLVETDKNMLGIHISKGPNEKLIFRRMDVNNAHELQKERSGILCYLNEMLFIFNKKGLIHYGCLRSYLEKGQGSKYIALFNPRFPANPKAQPSKFTSDSKIKQVGIGSATGIIKAHLDLDGHVRSYEVFGTLPEGSIEWFKEESGYGRVEDDPHH

SEQ ID NO: 196 - protein, 1327 aa, Solobacterium moorei
MEGQMKNNGNNLQQGNYYLGLDVGTSSVGWAVTDTDYNVLKFRGKSMWGARLFDEASTAEERRTHRGNRRRLARRKYRLLLLEQLFEKEIRKIDDNFFVRLHESNLWADDKSKPSKFLLFNDTNFTDKDYLKKYPTIYHLRSDLIHNSTEHDIRLVFLALHHLIKYRGHFIYDNSANGDVKTLDEAVSDFEEYLNENDIEFNIENKKEFINVLSDKHLTKKEKKISLKKLYGDITDSENINISVLIEMLSGSSISLSNLFKDIEFDGKQNLSLDSDIEETLNDVVDILGDNIDLLIHAKEVYDIAVLTSSLGKHKYLCDAKVELFEKNKKDLMILKKYIKKNHPEDYKKIFSSPTEKKNYAAYSQTNSKNVCSQEEFCLFIKPYIRDMVKSENEDEVRIAKEVEDKSFLTKLKGTNNSVVPYQIHERELNQILKNIVAYLPFMNDEQEDISVVDKIKLIFKFKIPYYVGPLNTKSTRSWVYRSDEKIYPWNFSNVIDLDKTAHEFMNRLIGRCTYTNDPVLPMDSLLYSKYNVLNEINPIKVNGKAIPVEVKQAIYTDLFENSKKKVTRKSIYIYLLKNGYIEKEDIVSGIDIEIKSKLKSHHDFTQIVQENKCTPEEIERIIKGILVYSDDKSMLRRWLKNNIKGLSENDVKYLAKLNYKEWGRLSKTLLTDIYTINPEDGEACSILDIMWNTNATLMEILSNEKYQFKQNIENYKAENYDEKQNLHEELDDMYISPAARRSIWQALRIVDEIVDIKKSAPKKIFIEMAREKKSAMKKKRTESRKDTLLELYKSCKSQADGFYDEELFEKLSNESNSRLRRDQLYLYYTQMGRSMYTGKRIDFDKLINDKNTYDIDHIYPRSKIKDDSITNRVLVEKDINGEKTDIYPISEDIRQKMQPFWKILKEKGLINEEKYKRLTRNYELTDEELSSFVARQLVETQQSTKALATLLKKEYPSAKIVYSKAGNVSEFRNRKDKELPKFREINDLHHAKDAYLNIVVGNVYDTKFTEKFFNNIRNENYSLKRVFDFSVPGAWDAKGSTFNTIKKYMAKNNPIIAFAPYEVKGELFDQQIVPKGKGQFPIKQGKDIEKYGGYNKLSSAFLFAVEYKGKKARERSLETVYIKDVELYLQDPIKYCESVLGLKEPQIIKPKILMGSLFSINNKKLVVTGRSGKQYVCHHIYQLSINDEDSQYLKNIAKYLQEEPDGNIERQNILNITSVNNIKLFDVLCTKFNSNTYEIILNSLKNDVNEGREKFSELDILEQCNILLQLLKAFKCNRESSNLEKLNNKKQAGVIVIPHLFTKCSVFKVIHQSITGLFEKEMDLLK

SEQ ID NO: 197 - protein, 738 aa, Treponema phagedenis
MLQELFAKEIAKIDEGFFRRLDESAFYLEDKSLKQKYSLFNDDNFTDKDYYKKFPTIHHLIKALINDETHVDIRLLYLACHTIIKNRGHFLFEGKEFNTESRFDDAINELFSYLRQDMEIDFAFEDKIADIKEILENKKIGMRDKQNALNKKLSIAPKDKQKKEIIKLIVGASFNLKTLFNDEKYSSEKESYSFAKSNYEEKEAVLESLLGDGFGLILRAKAVYDSSVLSEILGNETYLSFAKVKIYDKHKEDLAKLKKVIKTYHADEFKKVFAEANIQGNYCSYVGSCKKNGKKVPIEKRADKDAFYDFLKKILKDEKAKNSDADYAFILNEIELKTFLPKQVSKKNANIPYQLRRMELEKIVNNAEKYFSFLSEKDEYGTVKEKIIQLLTFKRPYYIGIIQDTHKEKFPDRCWVVKKENAKNEKITPWNFYDHIDEDKTAEAFITSRTNKCTYLIGEDVLPRNSLLYMEYTVLNELNNLKVSVDGVNIFDVKLKKKIYEQVFKQRKEVSKKTIADFLKKEGICKKENDVVITGIDEKCTTSLKLYIDIKKIIGKRIEEEPTKNALEDIILWASIYDEGEGRKILEAKIQSVYPDVFTQDELNKILKLKISGWGRFSRKFLESIVASFPGFTDTINIITAMRETNFNLMELLGDAYGFSKGIEKFNSKFNDDKKVFSYDKLVKDLYLSPSVKRMLWRALVIVKEVKSIMGKDPKKYLLKWQEEKKLKREGLPPAMQV

SEQ ID NO: 198 - protein, 1377 aa, Streptococcus equinus
MEKTYSIGLDIGTNSVGWAVITDDYKVPAKKMKVLGNTDKKYIKKNLLGALLFDSGETAEATRLKRAARRRYTRRKNRLRYLQEIFAKEMAKVDESFFQRLEESFLTDDDKTFDSHPIFGNKAEEDTYHQEFPTIYHLRKHLADSPEKVDLRLVYLALAHMIKFRGHFLIEGQLNAENTDVQKIFADFVGVYDRTFDDSHLSEITVDAASILTEKISKSRRLENLIKQYPTEKKNTLFGNLVALALGLQPNFKTNFKLSEDAKLQFSKDTYDEDLEELLGKIGDDYADLFTAAKNLYDAILLSGILTVDDNSTKAPLSASMIKRYEEHHEDLEKLKTFIKVNNFDKYHEIFKDKSKNGYAGYIENGVKQDIFYKHLKSIISEKNGGQYFLDKIEREDFLRKQRTFDNGSIPYQIHLQEMRTILRRQGEYYPFLKENQAKIEKILTFRIPYYVGPLARKNSRFAWAKYHSDEPITPWNFDEVVDKEKSAEKFITRMTLNDLYLPEEKVLPKHSYVYETFAVYNELTKIKYVNEQGKSFFFDANMKQEIFDHVFKENRKVTKAKLLSYLNNEFEEFRINDLIGLDKDSKSFNASLGTYHDLKKILDKSFLDDKTNEQIIEDIVLTLTLFEDRDMIHERLQKYSDIFTSQQLKKLERRHYTGWGRLSYKLINGIRNKENNKTILDFLIDDGDANRNFMQLINDDSLSFKTTIQEAQVVGDVDDIEAVVHDLPGSPAIKKGILQSVKIVDELVKVMGHNPQNIVIEMARENQITGYGRNRSNQRLKRLQDSLKEFGSDILSKKKPSYVDSKVENSHLQNDRLFLYYIQNGKDMYTGEELDIDHLSDYDIDHIIPQAFIKDNSIDNRVLTSSAKNRGKSDDVPSIEIVRNRKSYWYKLYKSGLISKRKFDNLTKAERGGLTETDKAGFIKRQLVETRQITKHVAQILDARFNTKCDENDKVIRDVKVITLKSSLVSQFRKEFKFYKVREINDYHHAHDAYLNAVVGTALLKKYPKLAPEFVYGEYKKYDVRKLVAKSSDNHSELGKATAKYFFYSNLMNFFKTEVKYADGRVFERPDIETNADGEVVWNKQRDFNIVRKVLSYPQVNIVKKVEVQTGGFSKESILPKGDSDKLIPRKTKKLQWETQKYGGFDSPTVAYSVLVVADVEKGKTRKLKTVKELVGISIMERSSFEENPVSFLEKKGYHNVQEDKLIKLPKYSLFEFEGGRRRLLASATELQKGNEVVLPQYMVNLLYHSQHVNNSHKPEHLNYVKQHKDEFKDIFNLIISIARINILKPKVVDNLINEFTEYGQEDISSLSESFINLLKFISFGAPGAFKFLKLDVKQSNLRYKSTTEALSATLIHQSVTGLYETRIDLSKLGEE

SEQ ID NO: 199 - protein, 1128 aa, Streptococcus vestibularis
MSDLVLGLDIGIGSVGVGILNKVTGEIIHKNSRIFPAAQAENNVERRTNRQGRRLTRRKKHRRVRLNHLFEESGLITDFTKVSINLNPYQLRVKGLIDELSNEELFIALKNMVKHRGISYLDDASDDGNSSVGDYAQIVKENSKQLETKTPGQIQLERYQKYGQLRGDFTVEEDGKKHRLINVFPTSAYRSEALRILQTQKEFNPQITDEFINRYLEILTGKRKYYHGPGNEKSRTDYGRYTTKKDSENEYITLDNIFGILIGKCTFYPEEYRAAKASYTAQEFNLLNDLNNLTVPTETKKLSEEQKNQIINYVKNEKAMGPAKLFKYIAKLLSCDVADIKGYRIDKSDKAEIHTFEAYRKMKTLETIDFEKMSRDQLDKLAYVLTLNTEREGIQEALDHEFADGNFSQEQIDELVQFRKANSSIFGKGWHNFSVKLMMELIPELYATSEEQMTILTRLGKQKTTSSSNKTKYIDEKLLTEEIYNPVVAKSVRQAIKIVNAAIKEYGDFDNIVIEMARETNEDDEKKAIQKIQKANKDEKDAAMLKAANQYNGRAELPHSVFHGHKQLATKIRLWHQQGERCLYTGKTISIHDLINNPNQFEIDHILPLSITFDDSLANKVLVYATANQEKGQRTPYQALDSMDDAWSFRELKAFVRESKSLSNKKKEYLLTEEDISRFDVRKKFIERNLVDTRYASRVVLNALQEHFRAHKTDTKVSVVRGQFTSQLRRHWGIEKTRDTYHHHAVDALIIAASSQLNLWKKQKNTLVNYSENQLLDIETGELISDDEYKESVFKAPYQHFVDTLKSKEFEDSILFSYQVDSKFNRKISDATIYATRQAKVGKDKKDETYVLGKIKDIYSQTGYDAFIKIYQKDKSKFLMYRHDPQTFEKVIEPILENYPNKEMNEKGKEVPCNPFLKYKEEHGDYIRKYSKKGNGPEIKSLKYYDSKLGNHIDITPKDSNNKVVLQSVSPWRADVYFNKTTGKYEILGLKYADLQFEKGTGTYKISQEKYNVIKKKEGVDSDSEFKFTLYKNDLLLIKDTETKEQQLFRFLSRTKPNVKHYVELKPYDKQKFEGNESLINVLGAVAKGGQCQKGINKPNISIYKVRTDVLGNQHIIKNEGDKPKLDF

SEQ ID NO: 200 - protein, 1080 aa, Methylocystis sp.
MRVLGLDGGIASIGWALIEIFEDHEPSDGRIIDTGAWMFDAPEEKSQTGTKLKSELRRIFRGQRRVIRRRRQRMNEVRRILHRHGLLSSDNRDALKQPGLDPWKIRAEGIDRLLSPIEFAVALGHIARHRGFKSNSKGAKTSDLDAESSRMKKAVGETREKLARFGSPAKLLVEDEGFVLRQTKLKSGALETVRRFRNRDGDYSRSLLRDDLAAEVRALFRAQARLQSTFAKVELEAEFTQAAFFQRPLQDSERLVGPCPFEPAEKRSPKRGYSFELFRFLSRLNHLTLREGSEERTLTVEELRTAAADFGGVAKFTFSTLRKRLALPDIAIFVGIKADDEKKLDVVARSGEAATGTARLRRVVIDALGELAWGALISAPERLDKITEIITFRSDLDRIRAGLIEAGFDTPLIEAIVRAAADGKLDAFTGVGHISAKAARNIIPGLMRGMTYDKACAAAGYDHTASRERDAFDVGMHGKEALKKILQEERISRELVGSPSARKALIEAVKQVKAIIEKYGVPDRIHVELARDVGKSIEERRDIHFGIEKRSRQKDKLRELFGKEVGHLPQDGERGKEELLRFELWNEQMGRCLYTDEYINPKQLVASDNSVQVDHILPWSRFGDDSYLNKTLCTAKANQDKKGRTPYEWFRADKPEAEWDAFVARVESIQFMKGLKKRNYKLKNAEEAAEKFRSRNLNDTRWTCRLLAEALKQLYPKGEKDKDGKERRRVFTRPGALTNRLRRAWSLQRRKKSEKGERIADDRHHALDAIIVAATTESLLIRATREVQDIERKGLHYDLTKNITQPWPGFADEALDAVEKVFVARAERRRARGKAHDATIRHIAVRDDEAKVYERKKVGDIKLGDLIRVKDAERNAPLIENLRKWIEAGSPRDNPPLSPKGDPVSKVRLVTKNKVNITLDTGNPERLATVDRGEMARVDVFRKANRKGKYEYYLVPIYPHEIATMETPPMRAVQGGGDDDKWPEIDSTFEFLWSINQLSLLELTKPDGEVIRSYFRSLDRNTGALTVSGIANSTATRKGIGTRTLIDFKKLHVDRLGQIFEVERELRTWRGETWRGKDCI

SEQ ID NO: 201 - protein, 1087 aa, Phascolarctobacterium succinatutens
MLRMKYAIGLDIGIASVGYAVLALDHEENPWGIIRLGSRIFDVAENPKDGASLALPRREARSVRRRLRRHHHRLERIKNLLINTEFITKDELLHLYDGNLSDVYELRVKALDYSVTNAELTRILLHLAQRRGFKSNRKSDANDKEAGQLLEAVSANAKRMQENHYRTVGEMFYKDDLFSKYKRNKGGTYLTTVHRDMIAAEARTILEKQFALGNNICTQDFIDKYLSILLSQRQFDEGPGEPSPYAGNQIANMIGKCTFEPNEYRAAKASYSFERFNLLQKVNHLRLLLEGKSIALDNEQRKKIIALAHDKADLRYSHIRKALGLDEKVLFNTITYNDDVSVIEKKTKFNFLQAYHQIKKVLAEDMQKLTTEQLDNIGQILSTYKSDNKRTEELSALGLEKKIIDALLGINGLSKFAHLSLKALRKINPYLEEGKIYNEACTAAGYDFKAHANTQKTELLPAYKEEMDDITSPVARRAIAQSIKVINAIIREQKGSPLYINIELAREMAKGFDERTQIDKANKENQAKNERIMERIRTEFHKANPTGMDLIKLKLWEEQDGRSPYSQKAISINRLFEPGYVDIDHIVPYSISFDDSFKNKVLVFSDENRDKGNRLPIAYLQSKFGAKAAENFMIWVQSNIKDYKKRQKLLKREITEEDINKFKERNLQDTKTISRFLYNYINDYLLFAPSDTGKKKRVTAVNGTITAYLRKRWGINKIRANGDKHHAVDAVVIACTTDKMIKDLSSFSRYHELEYTHTDTESFLVNSLTGEILKRFPYPWEDFRPELMARLSDNPADALRKLNLIFYHGIDLSTIKPIFVSRMPRHKVTGAAHKATIKSARCLDNGIVICKTSLQNLKLDKEGEIANYYAPESDTILYNALKERLRSYDNKPAKAFAEPFYKPKADGTPGPLVKKVKVYEKSTLNVAVQQNTAVADNDSMVRVDVFHVKGNGYYLVPIYIADTLKKELPNKAIVAYKPYADWPVMDDSNFIFSLYPNDLIKFEHKNSVKFAKVNKESTLNDFYSTKSEIVYFKGCNINTGAITIINHENTYVVSSLGVKTLPSLEKYQADVLGNYTKVKKEVRKPFR

SEQ ID NO: 202 - protein, 1375 aa, Lactobacillus ruminis
MRKNQEPYNIGLDIGTSSIGWSIMNDNFDLMRVKGKKGIGVRLYNEGQSAAERRMHRTARRRYGRRKWRLRLLEDFFDEHMAEVDDTFFARLKDSNISPKDDKKYRKSLLFPKSKGVTYQDDGEFYKKYPTMYHLRYALMTEHRKFDLREIYLAFHHMVKYRGNFLYDTSVDSFEAKNLDIKGKFDEINDLLSSYTDFYVDNSNAALVESILLEKNTTRKDKSKKIAKLLHVEDKEKGKNKKAKDLATQISNAVLGLKCNFHLIFELQQKYSFDLCSEKTEENIAKLSEVLDENQKMLLMILKEVQDQVMLNAFVPSGMSLSEAMMQKYDDYGEQLKIYHELEHSVSDDSAAKLRGAYRDYNDNIIKRIDGDNKKDTFYKRVKNILTKISKEYVDQDVLESCGKLKKLIDENKLFIRQRTAANGVLPHQLHQIEMRKIIDNQKEYYPWLAEPNPNEKRRVYSKYKVEELIAFRIPYYVGPLVDPNNADKNKEARFSWMVRKKDGEITPWNFYDKVDWAESANNFIERMKSKDTYLLGEDVVPKESMLYQKYEVLNELNNLRINDSGLSDSFEDVKLKQAIYNDLFKKQKIVKITDLQNYLVQNHKYLVKPKISGLADENRFLSSLSTYSDLKTIFGDKVDDRTYFNDFEKMVEYSTVFEDGHDYNQKLDEYTWLTKEEKYKIGKKRYRGWGKLSKKLLTGLRDKNNHTIMDNLWETNRNFMQIQTADEFSKQIAEENERHLKGSVSDAINDMYTSPANKKAIRQVLRVVDDIQKAMGYAPSSISLEFAREDGPSVRTVSRANRMKSIYEKYASEVSEEVMKDLDGVIKDKKGLNDRLYLYFEQQGKDMYSGHPLDFDKVISGQEYDIDHILPQAVIKDDSLDNRVLTTKALNNDVKSKGVPCRMFNGMHSFWKNLYDKGFISRRKFNNLTTNPENIDKYKMKGFVNRQLVETRQIIKLVANVLNDKYQNDDVDIIEVRAELTHDVRKHFKFYKNRNVNDYHHAFDAYLTSFIGHYLFKKYPNLRPLFDYNDFMKVSDNVFKQLRGNNFLGEFLNKTGDIISTDGNFVLNKEEMINKLNKAYAFKKILVTKEVGQRTGAMFNETRYPAPNSRKAALKYRRMPKPDSLISVKDYKNTDIYGGYSGKNDAYMVIVDMGKQYMVVGVPVRYTEKLDKLRIKHSELYRDELRKVLSRDKTLLDSKGNVKRFDIVLDRVLYGQLIEDGNELFTLGSSKYKRNFRQLFLDKQCIEILDSSATPQPTDEELIWVYDQILDKVDKYFELYDINRQRETLRKGRAAFCSLPNISMKKDDVTKKKILNEILVALHANESESNCEKIGKKVFGRLQVPGGIKLSKEAKLIYQSPTGLFERVVYLKDL

SEQ ID NO: 203 - protein, 1391 aa, Prevotella oralis
MKKILGLDLGTTSIGWALVNEKENNEELSSIIRLGVRVNPLTVDEKSNFEKGKDITTNADRTKCRSARRNLQRFKLRREALADCLKRHGLMTDETPLCETNNSIIFKTYSNRAKAVCEKIALDDFVRVLFMINKKRGYKSSRKLNTDDEGTLVDGMDVAKLLYNEQITPGEYLLRLFKKGKKTRPDFYLSDLKAELERIWDFQRTFYPEILCNALKEDLKGKSRTQSSAIFYAKYKVSTAKIAGKDKRLQELTWRTDALRKQLTIDEVAYVICSINGEVNGSSQRLSMISDRSKLLYFNHQTIGQYLMQRLEENPNAGLKNIIFYRQDYEDEFNDIWNSQATYHKELTPELKKEVKDIIFYQRGLKSCKWLINYCELEHEEIEVKTPEGKLRKITIGSKTCPKSSPLFQEFKIWQVLNNLQVSPLNSRRKAKRKKDEEPSLFSDEDMNTACRYLNEEEKLTLFKELSIKKELKKKDALKLLFENYKELDLNYKVISGNVTMANLYRAFQDIISLTGNGEFDFQAMPAEEAEKTVEEIFGGLGYKTAFLHFDASLHDKEFERQPAYRLWHLLYSYAGDQSKTGIEALVKRIQELCGFEPEYARILANISFIPDYGNLSSKAMRKILPYMQDGYEYSEACSKAGYRHSASSLTKEEINKKNYKTHLDEIKRNSLRNPIVEKILNQMVNVVNSVIDTYSNIDEIRIEMARELKKSKPEREDMSFAISKATKETERIKGILEQEFKIQHVTRNDIIRYRLYEELKPNGYKTLYSNTYIPREDLFSKKFDIEHIIPKARLFDDSYSNKTLELRDINIEKGNQTAYDFVLSKYGEEGLYKYEQRVEEFKKNNEQAGTKCRKLLMREADIPSDFLNRDLNDSQYIAKKAHELLREIVPTVTATTGSITNRLREDWKLVNVMKELNWEKYDKLGLTEEYKDKDGNTVRHIKDWTKRNDHRHHAMDALTIAFTKPSFIQYLNNLNARSNRGGSIYGIEQKELERENNKLVFIPPIDPKIFRKQAKEHLSNILISIKAKNKVVTKNVNKTKSKSGTNRKVQLTPRGQLHLETVYGKIRTYKTEEIKVGTKLTEELIAKVADKKIREALMQRLSEYGGNIKKAFQNISKHPIWLNGSHTKHVPEKVKIVFFEDVFTIRKAITPDIKIDKVIDSKIRRILQERLNEFGGEASKAFSNLDENPIWFNRDKGIAIKSVKIRGIAKGTAIRVKKDIHGKTIIGNNGYPVANDYVNTGNNHHVAIFRDKDGNLQEHIVSFYEATARAIQNLPIVDRNYNSEKDWKFLFSMKQNEYFVFPNPNTGFNPSEISLKDEKNYALISPNLFRVQKLSHYYYVFRHHLETNVDTNLQLKDITWKRITAVNNLTGAVKVRIDHLGRIVDVGEYK

SEQ ID NO: 204 - protein, 1167 aa, Streptococcus sanguinis
MLFGLKTKFKDCFELEEEPDLNFSKENYDDNLEKLLGELGEDFSDVFDKLKILRDTILLSGMLTYTGATHARFSATMVERYEEHRKDLQRFKSFIKQNLSEQDYLDIFGRKTQNGFDVDKETKGYVGYITNKMVLTNPQKQKTIQQNFYDYISGKITGIEGSEYFLNKISDRTFLRKLRTSDNGAIPNQIHAYELEKIIERQGKDYPFLLENKDKLLSILTFKIPYYVGPLAKGNNSRFAWIKRANSSDILDDNDEDTRNGKIRPWNYHKLINMDETRDAFITNLIGNDTILLNEKVLPKRSLIYEEVMLQNELTRVKYKDKYGKAHFFDSEHRQNIINGLFKINSKRVNAERLIKYLSDNHKDLNAIEIVSGVEKGKSFNSTLKTYNDFKTIFSEEFLDSEIYQKELEEIIKVITVFDDKKSIKNYLTKYFGHLEFLDEEKINQLSKLRYTGWGRYSAKLLLDIRDEDTGFNLLQFLRNDEENRNLTNLISDNTLSFDPKIKAIQSKSTVEDDVFDEIKKLAGSPAIKRGILNSIKIVDELVQIIGYPPQNIVIEMARENMTTEEGQKKTKTRKSKLESALKNIENSVLENGKVLHSDEQLQSEKLYLYYLQNGKDIYSLDETGSPAPIYLDQLDQYEVDHIIPYSFLPIDSIDNKVLTHRKNNQRKLDNIPDKETVAHMKPFWEALYNAKLISQTKYQRLTTSERTPDGVLTESMKAGFIERQLVETRQIIKHVARILDNRFSDTKIITLKSQLVTNFRNTFHIAKIRELNDYHHAHDAYLAVVVGQTLLKAYPKLAPELIYGHHVHFNRHEENKATLRKHLYSNIMRFFNNPDSKVSKDIWDCNRDLPIIKHVIYNSQINFVKRTMIKKGAFYNQNPVGKFNKQLAANNRYPLKTKALCLDTSIYGGYGPMNSTLSIIIIAERFNEKKGKIETVKEFHDIFIIDYEKFNNNPFQFLNDTSENGFLKKNNINRVLGFYRIPKYSLMQKIDGTRMLFESKLNLHKATQFKLTKTQNELFFHMKRLLTNSNLMDLKSESAIKESQNFILKHKEEFDNISNQLSAFSQKMLGNTTSLKNLIKGYNERKIKEIDIREETIKYFYDNFIKMFSFVKSGAPKDINDFFDNKYTVARMRPKPDKRLLNATLIHQSITGLYETRIDLSKLGED

SEQ ID NO: 205 - protein, 1334 aa, Staphylococcus pseudintermedius
MGRKPYILSLDIGTGSVGYACMDKGFNVLKYHDKDALGVYLFDGALTAQERRQFRTSRRRKNRRIKRLGLLQELLAPLVQNPNFYQFQRQFAWKNDNMDFKNKSLSEVLSFLGYESKKYPTIYHLQEALLLKDEKFDPELIYMALYHLVKYRGHFLFDHLKIENLTNNDNMHDFVELIETYENLNNIKLNLDYEKTKVIYEILKDNEMTKNDRAKRVKNMEKKLEQFSIMLLGLKFNEGKLFNHADNAEELKGANQSHTFADNYEENLTPFLTVEQSEFIERANKIYLSLTLQDILKGKKSMAMSKVAAYDKFRNELKQVKDIVYKADSTRTQFKKIFVSSKKSLKQYDATPNDQTFSSLCLFDQYLIRPKKQYSLLIKELKKIIPQDSELYFEAENDTLLKVLNTTDNASIPMQINLYEAETILRNQQKYHAEITDEMIEKVLSLIQFRIPYYVGPLVNDHTASKFGWMERKSNESIKPWNFDEVVDRSKSATQFIRRMTNKCSYLINEDVLPKNSLLYQEMEVLNELNATQIRLQTDPKNRKYRMMPQIKLFAVEHIFKKYKTVSHSKFLEIMLNSNHRENFMNHGEKLSIFGTQDDKKFASKLSSYQDMTKIFGDIEGKRAQIEEIIQWITIFEDKKILVQKLKECYPELTSKQINQLKKLNYSGWGRLSEKLLTHAYQGHSIIELLRHSDENFMEILTNDVYGFQNFIKEENQVQSNKIQHQDIANLTTSPALKKGIWSTIKLVRELTSIFGEPEKIIMEFATEDQQKGKKQKSRKQLWDDNIKKNKLKSVDEYKYIIDVANKLNNEQLQQEKLWLYLSQNGKCMYSGQSIDLDALLSPNATKHYEVDHIFPRSFIKDDSIDNKVLVIKKMNQTKGDQVPLQFIQQPYERIAYWKSLNKAGLISDSKLHKLMKPEFTAMDKEGFIQRQLVETRQISVHVRDFLKEEYPNTKVIPMKAKMVSEFRKKFDIPKIRQMNDAHHAIDAYLNGVVYHGAQLAYPNVDLFDFNFKWEKVREKWKALGEFNTKQKSRELFFFKKLEKMEVSQGERLISKIKLDMNHFKINYSRKLANIPQQFYNQTAVSPKTAELKYESNKSNEVVYKGLTPYQTYVVAIKSVNKKGKEKMEYQMIDHYVFDFYKFQNGNEKELALYLAQRENKDEVLDAQIVYSLNKGDLLYINNHPCYFVSRKEVINAKQFELTVEQQLSLYNVMNNKETNVEKLLIEYDFIAEKVINEYHHYLNSKLKEKRVRTFFSESNQTHEDFIKALDELFKVVTASATRSDKIGSRKNSMTHRAFLGKGKDVKIAYTSISGLKTTKPKSLFKLAESRNEL

SEQ ID NO: 206 - protein, 1156 aa, Ruminococcus albus
MGNYYLGLDVGIGSIGWAVINIEKKRIEDFNVRIFKSGEIQEKNRNSRASQQCRRSRGLRRLYRRKSHRKLRLKNYLSIIGLTTSEKIDYYYETADNNVIQLRNKGLSEKLTPEEIAACLIHICNNRGYKDFYEVNVEDIEDPDERNEYKEEHDSIVLISNLMNEGGYCTPAEMICNCREFDEPNSVYRKFHNSAASKNHYLITRHMLVKEVDLILENQSKYYGILDDKTIAKIKDIIFAQRDFEIGPGKNERFRRFTGYLDSIGKCQFFKDQERGSRFTVIADIYAFVNVLSQYTYTNNRGESVFDTSFANDLINSALKNGSMDKRELKAIAKSYHIDISDKNSDTSLTKCFKYIKVVKPLFEKYGYDWDKLIENYTDTDNNVLNRIGIVLSQAQTPKRRREKLKALNIGLDDGLINELTKLKLSGTANVSYKYMQGSIEAFCEGDLYGKYQAKFNKEIPDIDENAKPQKLPPFKNEDDCEFFKNPVVFRSINETRKLINAIIDKYGYPAAVNIETADELNKTFEDRAIDTKRNNDNQKENDRIVKEIIECIKCDEVHARHLIEKYKLWEAQEGKCLYSGETITKEDMLRDKDKLFEVDHIVPYSLILDNTINNKALVYAEENQKKGQRTPLMYMNEAQAADYRVRVNTMFKSKKCSKKKYQYLMLPDLNDQELLGGWRSRNLNDTRYICKYLVNYLRKNLRFDRSYESSDEDDLKIRDHYRVFPVKSRFTSMFRRWWLNEKTWGRYDKAELKKLTYLDHAADAIIIANCRPEYVVLAGEKLKLNKMYHQAGKRITPEYEQSKKACIDNLYKLFRMDRRTAEKLLSGHGRLTPIIPNLSEEVDKRLWDKNIYEQFWKDDKDKKSCEELYRENVASLYKGDPKFASSLSMPVISLKPDHKYRGTITGEEAIRVKEIDGKLIKLKRKSISEITAESINSIYTDDKILIDSLKTIFEQADYKDVGDYLKKTNQHFFTTSSGKRVNKVTVIEKVPSRWLRKEIDDNNFSLLNDSSYYCIELYKDSKGDNNLQGIAMSDIVHDRKTKKLYLKPDFNYPDDYYTHVMYIFPGDYLRIKSTSKKSGEQLKFEGYFISVKNVNENSFRFISDNKPCAKDKRVSITKKDIVIKLAVDLMGKVQGENNGKGISCGEPLSLLKEKN

SEQ ID NO: 207 - protein, 1440 aa, Weeksella virosa
MKTILGLDLGTNSIGWALVEQDFENKQGLILGMGSRIIPMDAGIIGKFAEGSSISQTAERTGYRSIRRLRERHLLRRERLHRVLNILKFLPEHYAAEIDFEKRFGQFLAETEPKLAWKKNAEGKFEFLFQRSFDEMVADFKANGQDIKIPYDWTIYYLRKKALTQKISPQELAWIILNFNQKRGYYQLRGEEEEENPNKKVEFYSLKIVDVVADEQPNKKGDTWYSLHLENGWVYRRSSKIPLYDWKDKVRDFIVTTDINEDGSEKLDKDGEVKRSFRAPKEDDWTLIKKKTEQEIEQFNQTVGSYIYEALLDNPTQKIRGKLVRTIERKFYKSELKKILEKQIELQPELFTEDLYNACARELYRRNVAHQQQLSSRDFVYLFLNDIIFYQRPLRSQKSLISNCSLEFRTIKDKDGNGQIIYLKAIPKSNPYYQEFRVWQWLYNLKIFTKEDDKDVTNQFINKVEDLEALFEFLMNQKEVNHTDILTYLIEPIVKSKYPNAKGKAFKDELKKELKKYRWNYVYDADKDESKSYPMNETRYELRKRLDKVENVPADFMTRKIEQHLWHIIYSVTDKIEFEKALKSFANKYDLHQESFVENFKRFKPFDSDYGTYSEKAIKKLLPLMRVGKYWSWDIIDDKTKTRIGKIITGEYDETIKNRVREKAIDLTEENHFQGLQLWLAQYIVYDRHSEADIAGKWNSVADLEQYLSEFKQHSLRNPIVEQVITETLRVVRDIWKQYGKGAKDYFDEIHIELGREMKNTAEERKRLSSIISENETTNLRIRAILEELMYDENMENVRPYSPMQQEALKIYEDGVLSSSVEIPEDIEKISKKSEPTKSEIQRYKLWLEQKYRSPYTGRPIPLSKLFTPAYQIEHIIPQARFFDDGFSNKVICESEVNALKDKMLGLEFIQNYYGQKVTTSFGEVTILTEDAYKAFVKEHYDKNRSKRNKLLLEEIPEKMIDRQMNDTRYISKYISKVLSNLVRGEKDDEGVNSKNIIPGNGKITGILKQDWGLNDVWNDLILPRFERMNQLTNSTDFTAWNEKHQKFLPSVPLELSKGFQKKRIDHRHHALDALIIACATRDHVNLLNNKHAKSRNERYDLQHKLRHTTPWQDKEGKVRTKFTEFKKPWETFTQDTKKELEKIVVNFKQNLRVINKATNYYEKIVDGKKVMFKQEGVNWAIRKPMHKETVSGKIDLPRVKVSKGKILTATRKSLDTSFNAKTILSITDTGIQKILLNYLKAKGNPELAFSPEGIEEMNQNISLYNDGKPHQPILKVRVFEQGSKFPLGETGNKTTKYVEAAKGTNLFFGVYEDNQGKRSYDTIPLNIVIERQKQGLNSVPETNEKGHRLLFSLSPNDLVYVPIEGEVFDETNPDVNRIYKVVSFSGSQMFCVRQDVATSIVYKLEFSSLNKMERTIDGIMIKEICIKLKVDRLGNISKA

SEQ ID NO: 208 - protein, 1179 aa, Sphaerochaeta globus
MSKKVSRRYEEQAQEICQRLGSRPYSIGLDLGVGSIGVAVAAYDPIKKQPSDLVFVSSRIFIPSTGAAERRQKRGQRNSLRHRANRLKFLWKLLAERNLMLSYSEQDVPDPARLRFEDAVVRANPYELRLKGLNEQLTLSELGYALYHIANHRGSSSVRTFLDEEKSSDDKKLEEQQAMTEQLAKEKGISTFIEVLTAFNTNGLIGYRNSESVKSKGVPVPTRDIISNEIDVLLQTQKQFYQEILSDEYCDRIVSAILFENEKIVPEAGCCPYFPDEKKLPRCHFLNEERRLWEAINNARIKMPMQEGAAKRYQSASFSDEQRHILFHIARSGTDITPKLVQKEFPALKTSIIVLQGKEKAIQKIAGFRFRRLEEKSFWKRLSEEQKDDFFSAWTNTPDDKRLSKYLMKHLLLTENEVVDALKTVSLIGDYGPIGKTATQLLMKHLEDGLTYTEALERGMETGEFQELSVWEQQSLLPYYGQILTGSTQALMGKYWHSAFKEKRDSEGFFKPNTNSDEEKYGRIANPVVHQTLNELRKLMNELITILGAKPQEITVELARELKVGAEKREDIIKQQTKQEKEAVLAYSKYCEPNNLDKRYIERFRLLEDQAFVCPYCLEHISVADIAAGRADVDHIFPRDDTADNSYGNKVVAHRQCNDIKGKRTPYAAFSNTSAWGPIMHYLDETPGMWRKRRKFETNEEEYAKYLQSKGFVSRFESDNSYIAKAAKEYLRCLFNPNNVTAVGSLKGMETSILRKAWNLQGIDDLLGSRHWSKDADTSPTMRKNRDDNRHHGLDAIVALYCSRSLVQMINTMSEQGKRAVEIEAMIPIPGYASEPNLSFEAQRELFRKKILEFMDLHAFVSMKTDNDANGALLKDTVYSILGADTQGEDLVFVVKKKIKDIGVKIGDYEEVASAIRGRITDKQPKWYPMEMKDKIEQLQSKNEAALQKYKESLVQAAAVLEESNRKLIESGKKPIQLSEKTISKKALELVGGYYYLISNNKRTKTFVVKEPSNEVKGFAFDTGSNLCLDFYHDAQGKLCGEIIRKIQAMNPSYKPAYMKQGYSLYVRLYQGDVCELRASDLTEAESNLAKTTHVRLPNAKPGRTFVIIITFTEMGSGYQIYFSNLAKSKKGQDTSFTLTTIKNYDVRKVQLSSAGLVRYVSPLLVDKIEKDEVALCGE

SEQ ID NO: 209 - protein, 1370 aa, Streptococcus gallolyticus
MTKKNYSIGLDIGTNSVGWAVITDDYKVPAKKMKVLGNTDKKYIKKNLLGALLFDSGETAEATRLKRTARRRYTRRKNRLRYLQEIFAEEMTKVDESFFYRLDESFLTTDEKDFERHPIFGNKAEEDAYHQKFPTIYHLRNYLADSSEKADLRLVYLALAHMIKYRGHFLIEGKLNAENTDVQKLFTDFVGVYDRTFDDSHLSEITVDVASTLTEKISKSRRLENLIKYYPTEKKNTLFGNLIALALGLQPNFKMNFKLSEDAKLQFSKDTYEEDLEELLGKIGDDYADLFTSAKNLYDAILLSGILTVDDNSTKAPLSASMIKRYVEHHEDLEKLKEFIKANKSELYHDIFKDKNKNGYAGYIENGVKQDEFYKYLKNTLSKIDGSDYFLDKIEREDFLRKQRTFDNGSIPHQIHLQEMHAILRRQGDYYPFLKEKQDRIEKILTFRIPYYVGPLVRKDSRFAWAEYRSDEKITPWNFDKVIDKEKSAEKFITRMTLNDLYLPEEKVLPKHSHVYETYAVYNELTKIKYVNEQGKESFFDSNMKQEIFDHVFKENRKVTKEKLLNYLNKEFPEYRIKDLIGLDKENKSFNASLGTYHDLKKILDKAFLDDKVNEEVIEDIIKTLTLFEDKDMIHERLQKYSDIFTANQLKKLERRHYTGWGRLSYKLINGIRNKENNKTILDYLIDDGSANRNFMQLINDDTLPFKQIIQKSQVVGDVDDIEAVVHDLPGSPAIKKGILQSVKIVDELVKVMGDNPDNIVIEMARENQTTNRGRSQSQQRLKKLQSSLKELGSNILNEEKPSYIEDKVENSHLQNDQLFLYYIQNGKDMYTGDELDIDHLSDYDIDHIIPQAFIKDDSIDNRVLTSSAKNRGKSDDVPSLDIVRARKAEWVRLYKSGLISKRKFDNLTKAERGGLTEADKAGFIKRQLVETRQITKHVAQILDARFNTEHDENDKVIRDVKVITLKSNLVSQFRKDFEFYKVREINDYHHAHDAYLNAVVGTALLKKYPKLASEFVYGEYKKYDIRKFITNSSDKATAKYFFYSNLMNFFKTKVKYADGTVFERPIIETNADGEIAWNKQIDFEKVRKVLSYPQVNIVKKVETQTGGFSKESILPKGDSDKLIPRKTKKVYWDTKKYGGFDSPTVAYSVFVVADVEKGKAKKLKTVKELVGISIMERSFFEENPVEFLENKGYHNIREDKLIKLPKYSLFEFEGGRRRLLASASELQKGNEMVLPGYLVELLYHAHRADNFNSTEYLNYVSEHKKEFEKVLSCVEDFANLYVDVEKNLSKIRAVADSMDNFSIEEISNSFINLLTLTALGAPADFNFLGEKIPRKRYTSTKECLTATLIHQSITGLYETRIDLSKLGEE

SEQ ID NO: 210 - protein, 1044 aa, Nitrosomonas sp.
MLHKMRYRLALDLGSTSLGWAMVRLNANQQPCAVIKAGVRIFSNGRNPKDGSSLAVTRREARSMRRRRDRLLKRKARMMRTLIEYGFFPANETQRKALENLNPYALRAKGLDEALTPSEFARALFHINQRRGFKSNRKTDKKDSDSGALKTAIKQLHSVLDPQGNDGKPRTVGELLYKRFTDLSKLPKDRTVRARYRQDKIVKDDGKTKIDKYYDLYIDRAMIEQEFDALWKKQSELNPILFTENARADLKDVLLYQRSLKPVKPGRCTFMSEEERAPLALPSTQRFRMYQEVNNLRILREGLKEESLTLQQRDDLINALEKNNRRTFTQIKKLLGVGGSVQFNFEDPKREELKGNTTSAILGKSEHFGEAWFAFNEAKQDAIVLQLIKEENEAKLVRWLQDETGIDEKRAEVIANAGLPEGYGSLCIEALARILPELRRDVVTYDKAVQAAGFEHHSKLNRNEEIPDITFKIESIDRNSGEIKQFHLHKELPYYGEYLQRHVGFGSGKPEDSIEKRYGKIANPTVHIGLNQVRVVVNALIKRYGHPSEIIVEVARDLKQSKDRRDEENKRQAENQKRNERLRKDIADILGISEERVRRDDIEKMILWEELSFDPADRRCPYSGVQVSTVMLLSDEVEVEHILPFSQTLDDSLNNKTVALRQANRIKGNRTPWEAFGTSNISGFDYSGILTRAELMPKAKRYRFAEDGYQRWLKDDAGFLARALNDTRHLSKIAREYMSLICPNTRVIPGQMTAMLRRNFGLNDVLGLNGEKNRNDHRHHAVDACVIAVTDQGLLQRFAAASASARERQLNRLVENMPLPWESYREHVRRAIDGIWVSHRPDHSHEGAMHNDTAYGLRGNGRVSFHKMVEGKREYIEDNLKVIEITDTKAIDRHGLLPTGKPRPYKGYKGDSNYCIEIVRNEKGRWEGEIISTFDAYQLVRKYGIVQLRYPVLSVSGKPLVMRLIRNDFVRLEHEGITRTLRVCKMREDGQVALADVTEANVDARTRTKEICYVFKTGGSLQKAKARRITISPIGELRDPGFKE

SEQ ID NO: 211 - protein, 1045 aa, Acidovorax avenae
MQKEKPLAYRLALDLGSTSLGWAVLRLSAPGEPSAVIRAGSRIFSDGRNPKDGSSLAVTRRAARAMRRRRDRLLKRKARMLAALERHGFFPQDEAARKALEKLNPYGLRARGLESALKPEEFGRALFHLNQRRGFQSNRKTDRKDSDSGALKQAIGTLRAQMHESGCRTVGEWFWKVRMERKPEGVKGQGVRARYRETPFTTDEGKKRIDKRYDLYVDRAMVAQEFDALWAAQATFAPALFNEAARAELRDILLHQRKLRPVQPGRCTLVPEEPRALLALPSTQRFRIYQEVNHLRVLHDELREEALTLAQRDQIVALLERQAKVTFTAMRKALGFSALFNLEDAKRDGLKGNATTAALGKKDLFGPLWAGFDTALQDEIVTQLMTEESEPRLIAWLQEHTGVDEARAQAIANAGLPEGYGSLGRTALARIVPELQRDVITYDKAVQAAGFAHHSDLGFSFEHDADEVERIGERTIASTGEIKPVFAFKQLPYYGRALQRHVAFAKENPRNDEERYGKIANPTVHIGLNQVRVVVNALMCRYGRPTEVVIELARDLKQSREQKLEAQQRQADNQKRNARIRRSIAEVLGISEERVRTLDIQKWILWEELSHDAADRRCPYSGVQISASMLLGERVEIEHILPFSMTLDDSLNNRTVALREANRIKRNRTPWDARTDFEAHGWSYDGILQRAERMPQRKRHRFAPDGYERWLGEDKDFLARALNDTRYLSRVAAEYLRLVCPGSATRVIPGQMTALLRGKFGLNDVLGLDGEKNRNDHRHHAVDACVIGVTDQRMMQRFAQANAQAREDGLTRLVEDMPLPWPTYRAHVERAVRHIWVSHKPDHGFEGAMMEETSYGILRDGTIKQRRKADGSAGREISRLIRITEPSQPQRHGVDAEGRPLPYKGYVGGSNYCLEITVNDKGKWEGQVISTFDAYRIVREGGLRQLRHSTQGQNGQALAMRLVIGDSVRLEVDEQERVMRIVKINGNNGQVFMAPVHEANVDARNSDKNEAFAYTSKIAGSFQKTKARQVTISPIGELRDPGFKG

SEQ ID NO: 212 - protein, 1218 aa, Prevotella denticola
MKASEEKLSKGLSTYMKENNLLTVGAAFAQLEDEGVRIRNNNNYRAIRSQFQHEIETIFMFQQGLSENELYERLVSEKKNIGTIFYKRPLRSQRGNVGKCTLERTKPRCAIGHPLFEKFRAWTLINNIKIRMSEEEQAEQLPMKLRFELYNDCFLAFVRAEFKFEDIRKYLEKRLGVHFSYNDKTINYKDSTSVAGCPITARFRKLLGEDWESFHVDGQKQRQAHGKNNASFHTVSYSTNDIWHFCYDAEEPEAVLSFAQDNLKWEKKKAEELVRIWSAIPQGYAMLSQKAIRNINKMLILGLKYSDAVLLAKVPEIVEITDGEILSVTEDYHRVEAQVGYEKQINNIVNALIAKYKSASEEYRFADHNYEYQLDKSDEKDIIKQIESNIGTRKWSLLDADEQTDILQKVRDKYQNFFRSHERKFVESPKLGECFEEYLMKKFPMVEGEQWKKLYHPSQIAIYRPVSAGKDRSALRLGNPDIGAIKNPTVLRVLNTLRKRVNQLLDDGLISPDETRVVVETARELNDANRKWALDNYNRIRHDENEKIKKILEEFYPKRDGISTDDIDKARYVIDQREMDYFTEEKPYNKDIKKYKLWLEQGGQCMYTGRTINLSNLFDPNSFDVEHTIPESISFDSSDMNLTLCDAHYNRFIKKNHIPADLPNYDKSVVIDGKEYSPIKPRLQRWADRVERLNRNVEYWRGQARRAQNKDRKDQCMREMHLWKMELEYWTKKLERFTITEVTDEFKNSQLVDTRVITRHAVLYLKSIFPHVDVQRGDVTAKFRKILGIQSVDEKKDRSLHSHHAIDATTLTIIPGAAKRERMLELFAKIEEVNKMLSFSGNEDRTGLKQELDGLKNQLNKEVKACRIGHNVSEIGTFINDNIIINHHVKNQALTPVRRRLRKRGHIVGGMDNPRWQTGDALRGEIHKASYYGAITQFAKDKDGKVLLKEGHPLVDPTIKFVIRRELKYKKSTADSGFASWDDLEKAIVDKELFALMKGQFPEETSFKDACEQGIYMIKKGKNGEVDTKLYRIRHIRCKTKQKNALKIKEQAYKSEKEYKRYFYAAVGDLYAMCCYTNGKTREFKIYSLYDISCHRKVGVEDIPEFITDKKGNRLMLDYKLHTGDMILLYKENPEELYDLDNVSLSKLLYKINGFENDGLRIRMVNHLVAKEAMGESVKDYAKLPDIIRCGVKTIKFLVMGENRDFVIKNGKISFNHR

SEQ ID NO: 213 - protein, 1458 aa, Fluviicola taffensis
MTKTILGLDLGTNSIGWALINQDFDNKKGEILGMGSRIIPMTQDIKDEFGKGNSISQTAERTRLRGVRRLIHRTLLRRERLHRVLNIIGFLPEHYANQIDFEKRFGKFKPESEPKISFDGNDVFLFEKSYQEMLVDFKIHQPQLVSNGKKIPHDWTIYYLRKKALSKKIEKEELAWILLNFNQKRGYYQLRGEEEEETPNKLVEFHSLKIVEVNADEPQKGKPEIWYSLVLENGWVYRRASKTPLFDWKDKIREFIVTTEINNDGTVKTDKEGTEKRSFRAPKPEDWTLQKKKTEFELSKSGNEVGAFIYESILQKPNQKIRGKLISTIERKFYKEELKTILKTQLFFHKELKDEKLYNACIEELYKNNEAHRSLLSNKGFEHLFINDILFYQRPLRSKKSQISNCPLEKRTYKKEGIEITEGIKVISKSNPIYQEFRLWQWISNLSLYCIEPTETNVTSTFLNSIEDYENLFEFLNNRKEIEQKHLLKYLLENQGFKGKLLTNELEKFRWNFVADKKYPCNETGSLLHTRLSKVKNISPDFLTKEIEHQLWHIIYSVTDKIEYEQALKTFARKNNLDVDSFFEHFKKIPPFESTYGAYSEKAIKKLLPLIRLGKYWNWEAIDSISKDRISKILSGEYDENIKNRVREKAVHLTSENNFQGLQEWLAKYIVYDRHSEGNDLGKWTSVSDLETYLKEFKQHSLRNPIVEQVITETLRVVKDIWIKHGKGTENFFDEIHVELGREMKNNSEDRKRLTNTITENENTNLRIKALLMEMMNDNDVENVRPYSPSQQEILKIYEDGALNSNIELDDEIVKISKKAEPTKSELQRYKLWLEQKYRSPYTGQVIPLNKLFTSEYEIEHVVPQSRFFDDSFSNKVICESAVNKRKDNQLGLQFIKNHSGEKVELGFGKVVQVFTEEQYLDFVKEHYSKNRSKHNKLLLEEIPEKMIERQLNDTRYISKFVSSILSNIVRSEKDDDGLNSKNILPGNGKITTELKRDWGLNDVWNDLILPRFERMNTITNSDLFTTYNDKYQKHLPTVPFEYSKGFQKKRIDHRHHAMDALVIACATRDHLNLMNNQSAKSELKRYDLQNKLRKKEPYFNQKENKQKEAFKDFIKPWGTFTEDSKNALEKIIISFKQNLRVINKATNSYESYKDEDGNLRIGKDGKPEKGLIKQKGLNWAIRKPLHKDTVSGQINLSRIKLPNGKILTATRKNLDTSFDLKTIENSITDTGIQKILKNYLLSKESPELAFSPEGLEEMNNEIEKYNNGKFHHPINKARIYELGSKFNVGQTGNRRDKFVEAAKGTNLFFAIYQDENKNRSYETIPLNEVIEHQKWRASLPKEEQEKIPLVPVNKLKGTFIFSLSPNDLVYVPSNDELERSASIDFSKLKKEQINRLYKMVSSSGSQCFFVKSEVATSVVNKMEYSSLNKMEKSIDNLMVKEICIKLKIDRLGNISKA

SEQ ID NO: 214 - protein, 1384 aa, Coriobacterium glomerans
MKLRGIEDDYSIGLDMGTSSVGWAVTDERGTLAHFKRKPTWGSRLFREAQTAAVARMPRGQRRRYVRRRWRLDLLQKLFEQQMEQADPDFFIRLRQSRLLRDDRAEEHADYRWPLFNDCKFTERDYYQRFPTIYHVRSWLMETDEQADIRLIYLALHNIVKHRGNFLREGQSLSAKSARPDEALNHLRETLRVWSSERGFECSIADNGSILAMLTHPDLSPSDRRKKIAPLFDVKSDDAAADKKLGIALAGAVIGLKTEFKNIFGDFPCEDSSIYLSNDEAVDAVRSACPDDCAELFDRLCEVYSAYVLQGLLSYAPGQTISANMVEKYRRYGEDLALLKKLVKIYAPDQYRMFFSGATYPGTGIYDAAQARGYTKYNLGPKKSEYKPSESMQYDDFRKAVEKLFAKTDARADERYRMMMDRFDKQQFLRRLKTSDNGSIYHQLHLEELKAIVENQGRFYPFLKRDADKLVSLVSFRIPYYVGPLSTRNARTDQHGENRFAWSERKPGMQDEPIFPWNWESIIDRSKSAEKFILRMTGMCTYLQQEPVLPKSSLLYEEFCVLNELNGAHWSIDGDDEHRFDAADREGIIEELFRRKRTVSYGDVAGWMERERNQIGAHVCGGQGEKGFESKLGSYIFFCKDVFKVERLEQSDYPMIERIILWNTLFEDRKILSQRLKEEYGSRLSAEQIKTICKKRFTGWGRLSEKFLTGITVQVDEDSVSIMDVLREGCPVSGKRGRAMVMMEILRDEELGFQKKVDDFNRAFFAENAQALGVNELPGSPAVRRSLNQSIRIVDEIASIAGKAPANIFIEVTRDEDPKKKGRRTKRRYNDLKDALEAFKKEDPELWRELCETAPNDMDERLSLYFMQRGKCLYSGRAIDIHQLSNAGIYEVDHIIPRTYVKDDSLENKALVYREENQRKTDMLLIDPEIRRRMSGYWRMLHEAKLIGDKKFRNLLRSRIDDKALKGFIARQLVETGQMVKLVRSLLEARYPETNIISVKASISHDLRTAAELVKCREANDFHHAHDAFLACRVGLFIQKRHPCVYENPIGLSQVVRNYVRQQADIFKRCRTIPGSSGFIVNSFMTSGFDKETGEIFKDDWDAEAEVEGIRRSLNFRQCFISRMPFEDHGVFWDATIYSPRAKKTAALPLKQGLNPSRYGSFSREQFAYFFIYKARNPRKEQTLFEFAQVPVRLSAQIRQDENALERYARELAKDQGLEFIRIERSKILKNQLIEIDGDRLCITGKEEVRNACELAFAQDEMRVIRMLVSEKPVSRECVISLFNRILLHGDQASRRLSKQLKLALLSEAFSEASDNVQRNVVLGLIAIFNGSTNMVNLSDIGGSKFAGNVRIKYKKELASPKVNVHLIDQSVTGMFERRTKIGL

SEQ ID NO: 215 - protein, 1077 aa, Neisseria bacilliformis
MQQKPQRYILGLDLGIASVGWACVWADENEHPTGLLDCGVRTFERAEVPKTGDSLALARRQARSVRRLIRRRAHRLLRLRRLLKREGVLLSADFNENGLVRGLPIDAWALRVAGLDRKLSNKEWAAVLLHLVKHRGYLSQRKNETQSKDKELGRLLAGVNGNREALQNRSDEYRTAAELAVKKFAAENNGSLRNKGGDYSHTFDRKDLQRELHLLFERQRALDNPFTSSEMEAAVDELLMKQRSALQGEAVLKMLGRCTFEPSEYKAAKNTYSAERFVWLTKLNNLRIQYNGEERALSEAERRLLLDEPYQKAKLTYKQVRTILELPESAVFKGLRYGHGEDGLKAESGTLMEMKAYHAVRKALKDAGLEGEWENRIRNPELLDAIGTAFSLYKTDEDIRANLAAFRLSENVLEALLAGLNFDKFVHLSLKALAKILPLMEQGMRYDEACKEAYGDHYGAKEQEDHRLLPPFVADDIRNPVVFRTLTQARKIVNEIVRRYGSPLRVHIETGREVGKSFSDRKEIEKRQEENRKERERAAAHFKELFPNFAGEPKAQDILKLRLYEQQHGKCLYSGKEIDLRRLPEKGYVEIDHALPFSRTWDDSFNNKVLVLGKENQDKRNRTPYEYLDGKGNSGAWRAFAERVSGCRFPYAKKQRLLTQKLDEKTEQGFLERNLNDTRYVARFLCQFIEEKMHLEGAGKKRVFASNGQITALLRGFWGLKKVREENDRHHALDAVVVACSSVSMQQKITRHFRYREELEHIDRETGEVIHGFPQPWEFFRQEVMTRVFSDDPVSELAEKLDSRPEAVHEFVTPLFVSRAPHRKVTGQGHLETIRSAKRLDEKISVVKLPLTQLKTKDIERIVGYPNREPALYDALAARLAAFKDDPAKAFSEPFYKTGKDGKCGVLVKAVRVENVQKSGLLVRKDESGKMQGVADNATMVRVDVFGKNGKNYLVPVYAWQVEKGELPNRAVVAYADEEDWDEMDDSFEFKFSLYPNDLVEVVTKKDKFFGYYSGFNRATGAINIKEHDLSKSKVKNGVYEGIGVKTAQSFQKYQVDTLGKTIRLCKPEKRMGFKKK

SEQ ID NO: 216 - protein, 1029 aa, Alicycliphilus denitrificans; identical to SEQ ID NO: 193

SEQ ID NO: 217 - protein, 1122 aa, Streptococcus suis; identical to SEQ ID NO: 87

SEQ ID NO: 218 - protein, 1428 aa, Parasutterella excrementihominis
MGKTHIIGVGLDLGGTYTGTFITSHPSDEAEHRDHSSAFTVVNSEKLSFSSKSRTAVRHRVRSYKGFDLRRRLLLLVAEYQLLQKKQTLAPEERENLRIALSGYLKRRGYARTEAETDTSVLESLDPSVFSSAPSFTNFFNDSEPLNIQWEAIANSPETTKALNKELSGQKEADFKKYIKTSFPEYSAKEILANYVEGRRAILDASKYIANLQSLGHKHRSKYLSDILQDMKRDSRITRLSEAFGSTDNLWRIIGNISNLQERAVRWYFNDAKFEQGQEQLDAVKLKNVLVRALKYLRSDDKEWSASQKQIIQSLEQSGDVLDVLAGLDPDRTIPPYEDQNNRRPPEDQTLYLNPKALSSEYGEKWKSWANKFAGAYPLLTEDLTEILKNTDRKSRIKIRSDVLPDSDYRLAYILQRAFDRSIALDECSIRRTAEDFENGVVIKNEKLEDVLSGHQLEEFLEFANRYYQETAKAKNGLWFPENALLERADLHPPMKNKILNVIVGQALGVSPAEGTDFIEEIWNSKVKGRSTVRSICNAIENERKTYGPYFSEDYKFVKTALKEGKTEKELSKKFAAVIKVLKMVSEVVPFIGKELRLSDEAQSKFDNLYSLAQLYNLIETERNGFSKVSLAAHLENAWRMTMTDGSAQCCRLPADCVRPFDGFIRKAIDRNSWEVAKRIAEEVKKSVDFTNGTVKIPVAIEANSFNFTASLTDLKYIQLKEQKLKKKLEDIQRNEENQEKRWLSKEERIRADSHGICAYTGRPLDDVGEIDHIIPRSLTLKKSESIYNSEVNLIFVSAQGNQEKKNNIYLLSNLAKNYLAAVFGTSDLSQITNEIESTVLQLKAAGRLGYFDLLSEKERACARHALFLNSDSEARRAVIDVLGSRRKASVNGTQAWFVRSIFSKVRQALAAWTQETGNELIFDAISVPAADSSEMRKRFAEYRPEFRKPKVQPVASHSIDAMCIYLAACSDPFKTKRMGSQLAIYEPINFDNLFTGSCQVIQNTPRNFSDKTNIANSPIFKETIYAERFLDIIVSRGEIFIGYPSNMPFEEKPNRISIGGKDPFSILSVLGAYLDKAPSSEKEKLTIYRVVKNKAFELFSKVAGSKFTAEEDKAAKILEALHFVTVKQDVAATVSDLIKSKKELSKDSIENLAKQKGCLKKVEYSSKEFKFKGSLIIPAAVEWGKVLWNVFKENTAEELKDENALRKALEAAWPSSFGTRNLHSKAKRVFSLPVVATQSGAVRIRRKTAFGDFVYQSQDTNNLYSSFPVKNGKLDWSSPIIHPALQNRNLTAYGYRFVDHDRSISMSEFREVYNKDDLMRIELAQGTSSRRYLRVEMPGEKFLAWFGENSISLGSSFKFSVSEVFDNKIYTENAEFTKFLPKPREDNKHNGTIFFELVGPRVIFNYIVGGAASSLKEIFSEAGKERS

SEQ ID NO: 219 - protein, 1371 aa, Lactobacillus buchneri
MKVNNYHIGLDIGTSSIGWVAIGEDGKPLRIKGKTAIGARLFQEGNPAADRRMFRTTRRRLSRRKWRLKLLEEIFDPYITPVDSTFFARLKQSNLSPKDSRKEFKGSMLFPDLTDMQYHKDYPTIYHLRHALMTQDEKFDIRMVYLAIHHIVKYRGNFLNSTPVDSFKASKVNFVDQFKKLNELYTAINPEESFQINLANSEDIGHQFLDPSIRKFDKKKQIPKIVPVSVDDKATDKINGKIASEIINAILGYKSKLDVVVQCTPVDSKSWALKFDEEDIDAKLQKILPEMDENQQSIIAILQNLYSQVTLNQIVPNGMSLSESMIEKYNDHHDHLKLYKKIIDQLADPKKKAALKKAYSQYVGDDGKVIEQADFWSSVKKNLDDSDLSKQIMDLIDAEKFMPKQRTSQNGVIPHQLHQRELDEIIEHQSKYYPWLAEINPNKHDLHLAKYKIEELVAFRVPYYVGPMITPDDQAKSAETVFSWMERKGKEAGQITPWNFDEKVDRNASANRFIKRMTTKDTYLIGEDVLPDESLLYEKFKVLNELNMVRVNGKLLKVADKQAIFQDLFENYKHISVKKLQNYIKSKTGLPSDPEISGLSDPEYFNNSLGTYNDFKKLFGNKVDEPDLQDDFEKIVEWSTVFEDKRILREKLNEITWLSDQQKDVLESSRYQGWGRLSKKLLTGIVNDQGERIIDELWNTNKNFMQIQSDNDFAKRIHEANADQMKAVDVEDVLADAYTSPQNKKAIRQVVKVVDDIQKAMGGVAPKYISIEFTRSEDRNPRRTISRQRQLENTLKDTAKSLAKSINPELLSELDNAAKSKKGLTDRLYLYFTQLGKDIYTGKPINIDEISTYDIDHILPQAFVKDDSLNNRVLVSKAINNGKSDNVPVQLFGAKMGHFWKQLAEAGLISKRKLKNLQTDPDTISKYAMHGFIRRQLVETSQVIKLVANILGDKYRNDNTKIIEITARMNHQMRDEFGFIKNREINDYHHAFDAYLTAFLGRYLYHRYIKLRPYFVYGDFKKFKEDKVTMRNFNFLHDLTDDTQEKIADAETGEVIWDRENSIQQLKDVYHYKFMLISHEVYTLRGAMFNQTVYPASDAGKRKLIPIKADRPINVYGGYSGSADAYMAIVRIHNKKGDKYRVVGVPMRARDRLDAAKKVSDADCDRALKDVLTPQLTKTKKSRKTGEITQVVEDFEIVLGKVMYRQLMIDGDKKFMLGSSTYQYNAKQLVLSDQSVKTLASKGRLDPLQESMDYNNVYTEILDKVNQYFSLYDMNKFRHKLNLGFSKFISFPNHNVFDGNTKASSGKREILEEVLNGLHANPTFGNLKDIGITTPFGQLQQPNGILLSDEAKIRYQSPTGLFERTVSLKDL

SEQ ID NO: 220 - protein, 1090 aa, Sphingomonas sp.
MDWRLGLDLGANSLGWAALRLDRAGDPIGILAMGSRIFSDGRDPKSGASLAVDRRAARAMRRRRDRFKQRQAALLKYLIRDGLFPADQADRQRLADEDPYALRARALDEELSLFEIGRALFHLNQRRGFQSNRKADRGQDDEAGKIAVGVDRLNQQMEEQGARTLGEFLHQRRRAATDANHIPSVRTRLRPETGEGAKGDGYDFYPSRALIAEEFEEIWAAQAPHYPDTLTQQVHDRLYEIIFHQRPLRAPQVGQCTLVAGETRLPKAHPLFQKRRLLEEINALMIVRPGEIAQRLTPEERDTLYLKLKDKRTVSFATLRKTLKLDSAARFNKESENRTELKGDEVAAELGAKTRLGTRWQHLSGDQQWEVVHRLMALESQADEAAFRDWISQTYDLLPEQAAAVLGARLPQGHGRFGPTATTTLIDSLLHDRTEDGRVVVYSEAVQRSGLGHHSDLRHDRDDEDVTELPYYGVALERHIMPGTAEPTDPEEMRIGRLTNPTVHIGLNQLRHVVNRLIRAYGPPKEIAIELARELKLSEDEKKKRNSENRDNRLAAEGRSKKLEEIRQRDTGANRALLKLWEELNPGNVLDRRCIYTGEQISIDMLFSDRVEVDHILPFAQTLDDSNGNKLLCLREANREKRRRSPYEAWGHTDRWPDIAERASRLPKPKRWRFEPDAMQRFATEDGFLARHLVDTQYLGRLAREYLSWLYPGRGEGSGHVWVSPGRLTEMVRRKLGLNDLLPDHNFGGGADQPKNRLDHRHHAIDALVVAIVDRGMLQAIARASGQDGSEGRERIHIPAPWDGFRDDLRVAVNGIIVSHRPDHGTVAKAGLARGRDQTAGRLHNDTAYGLTGETDAKGNSIVVRRIPLSAIKKPADIARVRDPLLRNALAEFTKGLDGKAFEARIGRFHELGPLLYRGIRRVRVVETLTVIPIRDAEGRAYKGYKGDSNYRYDVWEMPDGKWRCQVVSMFDAHQSTEQARPHPAARKILSLQRNDILAIERTEGDRELVRVVKFSEKQFAVAPPHEGGSLKTRDGNADDPFRYLYPSPNTLKGWRARQVRIDELGRVLDPGFPARKSVRRTRPRAAPVD

SEQ ID NO: 221 - protein, 1000 aa, Kingella kingae
MARAQRRLISRRANRMNKLRRLLKQENVLQANDYDEKGLIIGLPNQAWELRAQGLDRKLEPKEWAAVLINLVKHRGYLSQRKNESQTADKELGALLSGMNHNHQLLQSQSNQYRTPAELAIKQFATQDGHIRNQRGAYTHTFNRLDLQNELNQLFDAQTRLGNPHVSGSLKTAINDLLMNQKAALSGDAILEMLGRCTFEPSEYKAAKNTYSAERFVWLGKLTNLRIQDNGLESALSREQRELLLNEPYNKTKLTYQQVRKLLRLPETAFFKGLRYGKDNAESATFMEMKSYHAIRKSLENKSLKSEWEKLKTQPKLLDLIGTAFSIYKTDDEIAGCLKNQLPENVIIALQEQLNFSNFMELSLKALEKLLPLMEQGLRYDEACTQIYGNRHEKIADKTEKFLPNIPADKLRNPVVLRTLTQARKVINAIIRRYGSPARVHIETGREVGKSFSDRDKLKKQQEENQEQRRRAIDEWKQFFPNAAHEPKAVDILKLRLYQLQQGKCLYSGLPIDVRRLPEKGYVEIDHALPFSRTWDDSFNNKILVLASENQNKGNQTPYEYLRGADNSESWRLFVENVQNCQFSPNKKQKIMAKQLDEKGFLERNLNDTRYVSRFLCQFISEHLHLTGKGKKRVFASNGQITALLRGRWGLSKNREENDRHHAVDAVVVACSTVAMQQKITQFVRYQKGNVFTGERIDKETGEVISIHFPTPWEHFREEVMIRVFDDNPLRTLPEKLPNRPEALHEYVMPLFVSRMPTRKMTGQGHKETIKSAKRLDEKISVLRVPLTQLKLNDLENMVNREREPALYEALKARLEQFKNDPAKAFAEPFFKQGGQQVKAVRVEIVQKSGMLLRKINGVADNGSMVRVDVFEKSGKFYLVPIYAWQVAEGILPNYAVVAHKDESDWILMDESYHFKFALYKNDLLEVQTKKGGIMGYFASLDRATGAITIREHDRDKKKCKDGEHRSIGVKMASSFKKLQVDELGKNIHETRSRKRPNIG

SEQ ID NO: 222 - protein, 1130 aa, Streptococcus pasteurianus
MTNGKILGLDIGIASVGVGIIEAKTGKVVHANSRLFSAANAENNAERRGFRGSRRLNRRKKHRVKRVRDLFEKYGIVTDFRNLNLNPYELRVKGLTEQLKNEELFAALRTISKRRGISYLDDAEDDSTGSTDYAKSIDENRRLLKNKTPGQIQLERLEKYGQLRGNFTVYDENGEAHRLINVFSTSDYEKEARKILETQADYNKKITAEFIDDYVEILTQKRKYYHGPGNEKSRTDYGRFRTDGTTLENIFGILIGKCNFYPDEYRASKASYTAQEYNFLNDLNNLKVSTETGKLSTEQKESLVEFAKNTATLGPAKLLKEIAKILDCKVDEIKGYREDDKGKPDLHTFEPYRKLKFNLESINIDDLSREVIDKLADILTLNTEREGIEDAIKRNLPNQFTEEQISEIIKVRKSQSTAFNKGWHSFSAKLMNELIPELYATSDEQMTILTRLEKFKVNKKSSKNTKTIDEKEVTDEIYNPVVAKSVRQTIKIINAAVKKYGDFDKIVIEMPRDKNADDEKKFIDKRNKENKKEKDDALKRAAYLYNSSDKLPDEVFHGNKQLETKIRLWYQQGERCLYSGKPISIQELVHNSNNFEIDHILPLSLSFDDSLANKVLVYAWTNQEKGQKTPYQVIDSMDAAWSFREMKDYVLKQKGLGKKKRDYLLTTENIDKIEVKKKFIERNLVDTRYASRVVLNSLQSALRELGKDTKVSVVRGQFTSQLRRKWKIDKSRETYHHHAVDALIIAASSQLKLWEKQDNPMFVDYGKNQVVDKQTGEILSVSDDEYKELVFQPPYQGFVNTISSKGFEDEILFSYQVDSKYNRKVSDATIYSTRKAKIGKDKKEETYVLGKIKDIYSQNGFDTFIKKYNKDKTQFLMYQKDSLTWENVIEVILRDYPTTKKSEDGKNDVKCNPFEEYRRENGLICKYSKKGKGTPIKSLKYYDKKLGNCIDITPEESRNKVILQSINPWRADVYFNPETLKYELMGLKYSDLSFEKGTGNYHISQEKYDAIKEKEGIGKKSEFKFTLYRNDLILIKDIASGEQEIYRFLSRTMPNVNHYVELKPYDKEKFDNVQELVEALGEADKVGRCIKGLNKPNISIYKVRTDVLGNKYFVKKKGDKPKLDFKNNKK

SEQ ID NO: 223 - protein, 1119 aa, Lactobacillus coryniformis
MGYRIGLDVGITSTGYAVLKTDKNGLPYKILTLDSVIYPRAENPQTGASLAEPRRIKRGLRRRTRRTKFRKQRTQQLFIHSGLLSKPEIEQILATPQAKYSVYELRVAGLDRRLTNSELFRVLYFFIGHRGFKSNRKAELNPENEADKKQMGQLLNSIEEIRKAIAEKGYRTVGELYLKDPKYNDHKRNKGYIDGYLSTPNRQMLVDEIKQILDKQRELGNEKLTDEFYATYLLGDENRAGIFQAQRDFDEGPGAGPYAGDQIKKMVGKDIFEPTEDRAAKATYTFQYFNLLQKMTSLNYQNTTGDTWHTLNGLDRQAIIDAVFAKAEKPTKTYKPTDFGELRKLLKLPDDARFNLVNYGSLQTQKEIETVEKKTRFVDFKAYHDLVKVLPEEMWQSRQLLDHIGTALTLYSSDKRRRRYFAEELNLPAELIEKLLPLNFSKFGHLSIKSMQNIIPYLEMGQVYSEATTNTGYDFRKKQISKDTIREEITNPVVRRAVTKTIKIVEQIIRRYGKPDGINIELARELGRNFKERGDIQKRQDKNRQTNDKIAAELTELGIPVNGQNIIRYKLHKEQNGVDPYTGDQIPFERAFSEGYEVDHIIPYSISWDDSYTNKVLTSAKCNREKGNRIPMVYLANNEQRLNALTNIADNIIRNSRKRQKLLKQKLSDEELKDWKQRNINDTRFITRVLYNYFRQAIEFNPELEKKQRVLPLNGEVTSKIRSRWGFLKVREDGDLHHAIDATVIAAITPKFIQQVTKYSQHQEVKNNQALWHDAEIKDAEYAAEAQRMDADLFNKIFNGFPLPWPEFLDELLARISDNPVEMMKSRSWNTYTPIEIAKLKPVFVVRLANHKISGPAHLDTIRSAKLFDEKGIVLSRVSITKLKINKKGQVATGDGIYDPENSNNGDKVVYSAIRQALEAHNGSGELAFPDGYLEYVDHGTKKLVRKVRVAKKVSLPVRLKNKAAADNGSMVRIDVFNTGKKFVFVPIYIKDTVEQVLPNKAIARGKSLWYQITESDQFCFSLYPGDMVHIESKTGIKPKYSNKENNTSVVPIKNFYGYFDGADIATASILVRAHDSSYTARSIGIAGLLKFEKYQVDYFGRYHKVHEKKRQLFVKRDE

SEQ ID NO: 224 - protein, 1126 aa, Lactobacillus farciminis
MADRISLGLDIGVASVGFSVLDIDKGKVIELGARLFSATVAAGNQDRRDMRGARRLLNRNKQRRQDTGKLFKKFGLIDDFDKGSFYDNFNQNLNPYELRVKGLTEQLTKEELAESLYQIVKHRGISYALKDADVDEGGTDYSVSLKINSQELAEKTPAQIQLQRLNDYGKVRGQVVIGDDPDNQKVLLNVFPTSAYEKEAKQIIATQQQFYPESLTDKFTEEYCQILTRKRDYFVGPGNEKSRTDYGIYKTDGRTLDNLFEELIGHDKIYPEELRASAASYTAQLFNVLNDLNNLRILNYEDGKLTKEDKEKIIAEIKNNTTTINMLNVIKKVAGCSKDDIKGFRVNEKDKPEISSMPVYRKIHKDLLKAGVDISDWPVEFIDELSFILTLNTENGEIRKQLNNRLAPKFDFLNADLIQLIIDNKDSFEIKTNNKWHRFSVKTMNKLIPEMMERPVEQMTLLNEMGLVKKDKKRFENNKYLPYKEIAKDIFNPVASKSVREALKIVNAVLKKYGHIDYLVVEMPRDKNLKEEQDNIKEFQNKNKKAKDAAFEAFVKSVGSEQRVKEALSKNRKLQMKMRLWYQQQEIDPYNGKTIDATDLINNPDKFEIDHIIPQSISFYDSINNKTLCFASMNQVKGQKTPYEFMLEGHGQSYDKFKATVMANKNFGKAKRANYLFEENVSDIETRKRFLSRNLVDTRYSSRVVLNSLQDFFREKSADTKVTVIRGKFTSNMRKHWHIDKTRETFHHHAIDASIIAATPFLRMWKKGGTIFPVKVGEESIDIETGEILDDKNFDKAMYEEPYSGFVSEIMNADDRIKFSHQVDKKMNRKVSDATIYSTRTGKLAKDKKDAEYIVAKVKDIYSVDGFKKFKKVYDKDKTKFLLYKYDPRTFSKLERIISDCPDKVEKVQTNGKVKAVDISPFEMYRRDHGMIKKYSKKGNGPAIKQLKYLDKKLGSHIDITPANANGKHVILQSLKPWRTDVYLNHETGEYEIMGIKYSDLKFNKNEGYGIKKDKYLEIKKVEEVSEKSEFMFSLYRKDRVKVQDMKTGESVELLFWSRNFSNKKYAELKPISQAENDKKLPVYGKGRLIKRLIPKNCKIWKVNTTILGDPYYLEKESDSPKDILD

SEQ ID NO: 225 - protein, 1380 aa, Eggerthella sp.
MNLRHVGNYNIGLDMGTASVGWAAIDEQGELLHFKGKPTWGSRLFDSANTAATARMPRGQRRRYIRRRWRLDLLQKFFSEEMAEKDPEFFIRLRQSSLWPEDREGGHTAYHWPLFNDSDFNEKEYYEKFPTIFHLRQWLMETDEKADIRLIYLAFHNIVKHRGNFLQENNDSLSAQNANMRESLESFCIALEEWCDEKELTCSCDPQKLEHLFKEVKYRSDIRDGFAALLGLACSGENEVDVKAMAKEMGKAIVGYKADFSKIFTECDKEGSSFRLSDDEGPEAFLDICPDDGIALFEAIQMVYSSFILTGMLTEKGLSLSKISAYNQYGQDLESLKALVKEYVPNEYSSFFRGPTYSGSTEYDPSKAQGYTRYNLGPSKKGSGAKPMAYEDFKKSVEQLFANTNAINDERYKEMMGRFAEEKFLRRLRTSDNGRIPFQLNLEEMTAIIINQGKYYPFLLEQQEKLESLVRFRIPYYVGPLTRINARLDSKGNACFAWSKRKDGMDSASIKPWNWDEVIDKHASAQAFIERMTGTCTYLRGEPVLPRCSLLYEEYCVLNELNGARWTQDGDKFIRFDYKDRSDIIEELFKKRRGRIQYAAVADWMKQERSHANVHVSGGQGENAFESRLSSYHFFCNDVFGVDELPGSYVDMVEEIILWSTLFEDRSILREEIQRKYGDVLNEEQIKTICKKRFSGWGRLSRKLLCSLKAQTDNGPKSIMDILQEGDQNNGRVGRAMVFQEILHDEQLGFEQKIEEENTQSMLEGENLLIEDLPGSPAIRRSINQAVRIVDEIVGIAGHAPDNIFIEVTREDDTKKKGKRTTTRYSNIQKALEALKEEGAEALRELKTYKHNELDKRLSLYFMQNGKSLYSGIPLDIRRLSEYQIDHIIPQSYIKDDSYENMALVLPGENQSKADNLLISQDIRIKMKATWTALHKAGLMGDKKYNNLMNSSISDAKMKGFINRQLVETSQSVKLTQMMLSQKYPGAKVRPIKASISSQLRDACDLVKCREANDYHHAHDAYLACQVGRFVLKRHSSMFDNPIGMTKVIRDFVKRQGQEFKRNGKLPAYASRSGFIVQSFMRSGFDAETGELLRDDWNAPFEIARIKRCLNYRDCYISRMPMEDSGAFWDATIYSPKAGKKGALPVKQGLPVEKYGSYSREQFAYFFVYKAYNPKKKAYRLEFEAVPVRVASAVETRENALEEYAKSVAKQAGLEFVEVARPKVYKYQLIELGEDRLYITGKREVRNASQLAFSLDEIDLLKRLAEGEETSSEERERLFDVLIEKYARYAPRLARQLSVDSMSATFETLNAEEQLGILLSLVEIANGKRNMIDLSSAGGSKNAGCMNPTFSSELSSPGSNFTFIDQSVTGMFERRQRLEL

SEQ ID NO: 226 - protein, 1430 aa, Capnocytophaga canimorsus
MKHILGLDLGTNSIGWAVVKEAQNDNEQSEIVDVGVRVNPLTTDEKTNFEKGKPISTNADRTLKRSARRNLQRYKLRRKELIELLKEHQLISTDTILTENGKGTTFQTLELRAKSAKEKISLEELARVFLTINKKRGYKSSRKAKNEDEGQLIDGMEIAKRLYEENLTTGQLSLQLLKEGKKSLPDYYRSDLQFELDKVWNFQKQFHSHILTDEFYAQLKGKGQRATSALFLAKYQIYTAENKGSREDKKLQAYQWRVDALSKELTREQLAFVITEINNNLNNSSGYLGAISDRSKELYFNNETVGEYLWKQIAANPHTSLKNQVFYRQDYLDEFEQIWKTQSAFYPEILTDELKKELRDVVIFYQRKLKSQKSLVSFCEFENKEIEIKKEDGTSTKKVIGLKVAPKSSPLFQEFKIWQNLNNVLIRKKGSKTKKVDKNQQAVLFEEEKTIFELDLEAKQALFNELNLKGNLKAYYCLEILGYSPKEWEMNYSVLEGNRTNKALYEAYLKITDLEGYDAKNHLKVKLNKDEVELDDLKVPASEIKDMVQAIFKEAGINTDILHFNAELDGKDFENQASYQLWHLLYSYEGDDSKSGNELLYKLLETKFGFKKEYAQILANVSLSDDYGSLSTKAMRKIHPYIKENKFSTACELAGYRHSKHSLTKEENDNRVLKDSLEVLKKNSLRQPVVEKILNQMINLVNALLKKYRTENPNFKFDEIRIELARELKKNAEERANMTVNINKAKTEHEKIIKILKNEFGLPNPTRNDIIRYRLYEELKANGYKDLYTNEYIEKQDLFTKNIDIEHIIPKSRVFDDSFSNKTLSFRKTNLDKGERTAFDYIESKFGADKLEEYVARVEDLYKNNIISKAKYQKLLKKESEIGDGFVERDLRETQYIAKKAKEILLQITPNVLSTSGGITDRLREDWDLINVMKELNLPKYRALGLTQMEDRKYGQQVEVIIDWTKRNDHRHHAMDALTVAFTKHNHIQYLNYLNARKNEKHREHSNIMGIQQLETIKVTDKNGNEKRVFKAPMPNFRQVTKAFLENVLISHKAKNKVVTKNKNKVAGSNKVQEVLTPRGQLHKETVYGKYQYYVQKEEKIGGKFDLETIKKVANPLYQSLLKKRLEENGGDPKKAFTGKNSLAKNPIYLDDAQTEQLPEKVKLVWLENSFSIRKDITPENFKDEKLIDKILDEGVKRILKERLQSFGNDAKKAFSDLDKNPIWLNKEKGIAIKRVAISGVANAEPLHTKKDHLGKEILDKEGKSIPVDFISTGNNHHVAVYRDEKGNLQEKVVSVFEAVVRANQGLPIIDKTYNQHLGWEFLFTMKQNEMFVFSNESTGFNPNDIDLLDPKNKKIISPNLFRVQKFSKLQYGNSFVREFVFRHHLETTVEDRKELQGITYKQMKNSAFFNDIIKVRINHLGGIVSVGEY

SEQ ID NO: 227 - protein, 1348 aa, Finegoldia magna
MKSEKKYYIGLDVGTNSVGWAVTDEFYNILRAKGKDLWGVRLFEKAKTAADTRTFRSGRRRNDRKGVRLQILREIFEDEIKKVDKDFYDRLDESKFWAEDKKVSGKYSLFNDKNFSDKQYFEKFPTIFHLRKYLMEEHGKVDIRYYFLAINQMMKRRGHFLIDGQISHVTDDKPLKQQLILLINDLLKIELEEEFMDSIFEILADVNEKKTEKKNILKELINAQDFNKQEGKILYSIFESIVTGKAKIKNIISDEDILEKIKEDNKEDFVLTGDSYEENLQYFEEVLQENITLFNTLKSAYDFVILQSILKGKSTLSDAQVERYDEHKKDLEILKKVIKKYDEDGKLFKQVFKEDNGNGYVSYIGYYLNKNKKITAKKKISNIEFTKYVKGILEKQCDCEDEDVKYLLGKIEQENFLLKQISSINSVIPHQIHLFELDKILENLAKYYPSFNNKKEEFTKIEKIRKTFTFRIPYYVGPLNDYHKNNGGNAWIFRNKGEKIRPWNFEKIVDLHKSEEEFIKRMLNQCTYLPEETVLPKSSILYSEYMVLNELNNLRINGKPIDTDVKLKLIEELFKKKTKVTLKSIRDYMIRNNFADKEDFDNSEKNLEIVSNMKSYIDFNNILGDKFELEMVEDLIEKITIHTGNKKLLKKYIEETYPDLSSSQIQKIINLKYKDWGRLSRKLLDGITGTNIETGEIDTVINFLRNSSDNLMQIIGSQNYSFNNDIDKLRKKYIPQEISYEVVENLYVSPSVKKMIWQVIRITEEITKVMGYDPDKIFIEMAKSEEGKKTTISRKNKLLALYKAIKKDERDSQYEKLLTGLNKLDDSDLRSRKLYLYYTQMGRDMYTGEKIDLDKLFDSTHYDKDHIIPQSMKKDDSIINNLVLVNKNANQTTKGNIYPVPSSIRNNPKIYNYWKYLMEKEFISKEKYNRLIRNTPLTNEELGGFINRQLVETRQSTKAIKELFEKFYKKSKIIPVKAILASDLRKDMNTLKSREVNDLHHAHDAFLNIVAGDVWNREFTSNPINYVKENREGDKVKYSLSKYFTRPRKSKGKVIWTPEKGRKLIVDTLNKPSVLISNESHVKKGELFNATIAGKKDYKKGKIYLPLKKDDRLQDVSKYGGYKAINGAFFFLVEHTKSKKRIRSIELFPLHLLSKFYEDKNTVLDYAINVLQLQDPKIIIDKINYRTEIIIDNFSYLISTKSNDGSITVKPNEQMYWRVDEISNLKKIENKYKKDAILTEEDRKIMESYIDKIYQQFKAGKYKNRRTTDTIIEKYEIIDLDTLDNKQLYQLLVAFISLSYKTSNNAVDFTVIGLGTECGKPRITNLPDNTYLVYKSITGIYEKRIRIK

SEQ ID NO: 228 - protein, 1352 aa, Megasphaera sp.
MKKRNREEYYVGLDIGTSSVGWAVATPDYRIPKFRGHKMWGSRLFAEGKRAAERRQFRTNRRRLARRRDRLQILEELFAEEMAKVDNTFFMRLKESKFFLEDKTVKEKHILFSTDKFDADRFYKDNPTIYHVRKRLMEEEPQDIRELFLAVHHILKYRGHFLFAGSLEQNGASIEELVRTLLGKQGLAILDDTIDSNEMVNILKNTGETKSDRKKDVQELWNPLKDKVKKAQAAEMAGLVLGLKSDISKLFANSDYKDLDSSIKNINFSSGDYEEKRDDYANSIGDDIVLLDTMKALYDTLILSQILQGKRSISAAKVEDYNTHKEQLRALKAILKPHKRLYNEMFRENNKKDLSNYVAYISSYSEGKRVNREGFYKYVQAVLKQVDDSDSKQAILEAIRLETFLPLLRVKDNAVIPHQIHQAELEAILETARKKYNFLNDVSDGVSVKDKIIQLFTFRIPYYVGPLNPHSGETVADRKQGTGWVVRKQRGKVYPWNFADMVDVKASAEAFITNLTNKCTYLIGEDVLPKRSLLYSEFMLLNELNMIKYDGHELPVAIKQLYIEQVFKQEHKKQTKGRVLDFLKRNGLITGSATAVITGMDDAIKGDLQSYRDMVRIFGAGFDHSMAERIIRWVTLFGEAKDILENKIREVYGNSISDSQMRAIKKLKYADWGRLSQAFLIAVKGCDKSGVERNIITCLRASSQNLMEILSDQGTYIKQIKAWNHQHTTNMMDTLDYQLVDDLYVAPSVKRSIWQSLCIVEELVKIMGQAPKKIFVEVTRTKQAEKTKKDSRKKRLVELYTAIGKEGAAWKKEIEAHQAGDFRRKKLYLYYTQMGRCMYSNEPIAMDALFTSAYDIDHIYPQSLTKDGSWDNLVLVKSQLNKEKSDQYPLRPAIREKNKAHWQYLCRAGFISEKKYERLMRTTELTAEELSGFIARQLVETSQATKAVTGLLERIYTNTEICFVKAETVSQFRHQHNFIKIRELNNYHHAKDAYLNIVVGNVYHEKFTKNPWEFIARSTERRPYNLNRMYDFDLLKQGRVIWQVPKSLETVQAMMKSNDVRITKKLLVQKGELYDATITKAHKAKEGTYFPLKGADARLRDVHRYGGYEKIKIAYYSVFSCREKASNTIHTLIIPIPVYKAGLLQTEADLTAYAWQTKQKTKPIKDIYSAITPIYKKLCINTVVKIDGFKYFLGGKTGDYMWLDPAIPVVLDEQAAAYLKAISKVGRADDVENTAQAIDLITAEANEAFYDVLLKKMEAKIFAKAYQTIVEKLASETARERFRELSIGAQCSCLLEILNLLANNKTTFTFFKDKMGVTMSRRKQPMDLTKLEECIVYETSITGLYEKAVSLL

SEQ ID NO: 229 - protein, 650 aa, Haemophilus pittmaniae
MENKNLHYILGLDLGIASVGWAVVEIDKEENPLCLIDVGVRTFERAEVPKTGESLALSRRLARSARRLTQRRVARLKKAKRLLKLENILLSTDERLPHQVWQLRVEGLDRKLKRQEWAAVLLHLIKHRGYLSQRKNESKSENKELGALLSGVASNHELLQQTTYRTPAELAVKKFEVEEGHIRNQQGAYTHTFSRLDLLAEMELLFSRQQHFGNPFASEKLLENLTALLMWQKPALSGEAILKMLGKCTFEDEYKAAKNTYTAERFVWITKLNNLRIQENGLERALNDNERLILIEQPYEKAKLTYAQVRSILNLSDEAIFKGLRYSGEDKKAIETKTTLMEMKAYHQIRKVLEGNNLKAEWTELKENSTLLDEIGTAFSLYKTDEDISTYLAGKLSQPVLNALLENLSFDKFIQLSLKALYKLLPLMQQGLRYDEACHEMYGDHYGKKTYGKKTEENHYFLPQIPADEIRNPVVLRTLTQARKVINGVVRLYGSPARIHIETGREVGKSYKDRRELEKRQEENRKQRENAIKEFKEYFPHFAGEPKAKDILKMRLYKQQNAKCLYSGKPIELHRLLEKGYVEVDHALPFSRTWDDSFNNKVLVLANENQNKGNLTPFEWLDGKHNSERWRAFKALVETSAFPYAKNNAS

SEQ ID NO: 230 - protein, 1062 aa, Ralstonia syzygii
MAEKQHRWGLDIGTNSIGWAVIALIEGRPAGLVATGSRIFSDGRNPKDGSSLAVERRGPRQMRRRRDRYLRRRDRFMQALINVGLMPGDAAARKALVTENPYVLRQRGLDQALTLPEFGRALFHLNQRRGFQSNRKTDRATAKESGKVKNAIAAFRAGMGNARTVGEALARRLEDGRPVRARMVGQGKDEHYELYIAREWIAQEFDALWASQQRFHAEVLADAARDRLRAILLFQRKLLPVPVGKCFLEPNQPRVAAALPSAQRFRLMQELNHLRVMTLADKRERPLSFQERNDLLAQLVARPKCGFDMLRKIVFGANKEAYRFTIESERRKELKGCDTAAKLAKVNALGTRWQALSLDEQDRLVCLLLDGENDAVLADALREHYGLTDAQIDTLLGLSFEDGHMRLGRSALLRVLDALESGRDEQGLPLSYDKAVVAAGYPAHTADLENGERDALPYYGELLWRYTQDAPTAKNDAERKFGKIANPTVHIGLNQLRKLVNALIQRYGKPAQIVVELARNLKAGLEEKERIKKQQTANLERNERIRQKLQDAGVPDNRENRLRMRLFEELGQGNGLGTPCIYSGRQISLQRLFSNDVQVDHILPFSKTLDDSFANKVLAQHDANRYKGNRGPFEAFGANRDGYAWDDIRARAAVLPRNKRNRFAETAMQDWLHNETDFLARQLTDTAYLSRVARQYLTAICSKDDVYVSPGRLTAMLRAKWGLNRVLDGVMEEQGRPAVKNRDDHRHHAIDAVVIGATDRAMLQQVATLAARAREQDAERLIGDMPTPWPNFLEDVRAAVARCVVSHKPDHGPEGGLHNDTAYGIVAGPFEDGRYRVRHRVSLFDLKPGDLSNVRCDAPLQAELEPIFEQDDARAREVALTALAERYRQRKVWLEELMSVLPIRPRGEDGKTLPDSAPYKAYKGDSNYCYELFINERGRWDGELISTFRANQAAYRRFRNDPARFRRYTAGGRPLLMRLCINDYIAVGTAAERTIFRVVKMSENKITLAEHFEGGTLKQRDADKDDPFKYLTKSPGALRDLGARRIFVDLIGRVLDPGIKGD

SEQ ID NO: 231 - protein, 1052 aa, Haemophilus parainfluenzae
MENKNLHYILGLDLGIASVGWAVVEIDEKENPLRLIDVGVRTFERAETQKGESLALSRRSARSARRLTQRRVARLKKAKRLLKSENILLSTDERLPHQVWQLRVEGLDRKLERQEWAAVLLHLIKHRGYLSQRKNESKSENKELGALLSGVASNHELLQQATYRTPAELAVKKFEVEEGHIRNQQGAYTHTFSRLDLLAEMELLFSRQQHFGNPFASEKLLENLTALLMWQKPALSGEDILKMLGKCTFEDEYKAAKNTYTAERFVWITKLNNLRIQENGLERALSDNERLMLIEQPYEKAKLTYAQVRSILNLSDDAIFKGVRYSGEDKKAIETKTTLMEMKAYHQIRKVLEGNNLKAEWVALKANPTLLDEIGTAFSLYKTDEDISAYLAGKLSQPVLNALLENLSFDKFIQLSLKALYKLLPLMQQGLRYDEACREIYGDHYGKKTEETHHFLPQIPADEIRNPVVLRTLTQARKVINGVVRLYGSPARIHIETGREVGKSYKDRHELKKRQEENRKQREKTISEIKTLFPNFSGEPKGKDILKMRLYYQQNAKCLYSGKPLELHRLFEQKYVEVDHALPLSRTWDDSFNNKVLVLANENQNKGNLTPFEWLDGKNNSERWRTFKALVETSAFPYAKKQRILSQKLDEKGFIERNLNDTRYVARFLCNFIADNMHLTGEGKRKVFASNGQITALLRRRWGLAKSREDNDRHHALDAVLVACSTVAMQQKITRFVRFKAGDVFTGERIDRETGEIIPLHFPTPWQFFKQEVEIRIFSDNPKLELENRLPDRPQANHEFVQPLFVSRMPTRKMTGQGHMETVKSAKRLNEGISMIKMPLTKLKLKDLELMVNREREKDLYDALKTRLEAFNDDPAKAFAEPFMKKGGAIVKSVRVEQVQKSGVLVRQGNGVADNASMVRVDVFTKDGKYFLVPIYTWQVAKGILPNKAVIQGKDEEDWEDIDDATFQFSLHPNDLISVKTKKDEFLGYFNGLNRHTGGINIRTHDLEKSKGKQGIFEGIGVKIALSFEKYQIDELGKNIRLCKPSKRQPVR

SEQ ID NO: 232 - protein, 1331 aa, Lactobacillus sanfranciscensis
MNKQPYNIGLDIGTSSVGWSATELDNRLLHIKGHNGIGVRLFKEGESAADRRGFRTTRRRLARRKWRLRLLNEIFATEIAKVDPSFFARLKQSNVSPKDPNKTMFENILFDDENLDDQKFHHDYKTIYHLRQAIINHPEQKFDIRLIYLAMHHIIKYRGHFLNQANVQDFKGGKIDLEKSFKALNDIFENQGRDLRLVTDKANQYVKVLSDNAKTRSDRKKELSKLLYVPIDKDTDKNSKKVTGEILKAILGNKAKFDVIFGIEVENPKEWVLTFNSDDFDDKIEGLSSQMTDEDSEILLILKELYFALNLSDILNNSVTDKNAKTLSEAMINRYDDHKNQLAMLKKVIDSSDKKHAKELKEAYSAYIDGENNKKISFEDLKKRIQKNLVDSELSQKINDLLDHDYFLPKQRSKENGAIPHQLQQQELDQIIESQKQYYPFLAELNPNEKRSRQAKYKLDELVAFRVPYYVGPMVEVTDSNQENNGKFAWMIRKEQGEITPWNFDEKVDRTETATKFITRMTTTDTYLIGEPVLPKNSLLYQKFVVLNELNNLKINQEIITPGQKQYLYEHVMKKNKRVTLKKIADALVIKGDYPYAPEVKGTTDQKNLNNGLTTYIDLAKIFGNELDDVDREADFEKIIEWSTIFEDQHIFALKLQELKWLTEKQRNQVVKLRYQGWGKLSKELLAGLVDDNGQRIIDLLWSDNQNFMQIVNQKSFKESIADHNGAHLEEKNLKDVINDLYTSPQNKKAIRQVILVVDDIINAVGYEPANIMMEFAREDSNDHRLTNSRSRQLENVYKDITNSWFDNDSVKDELEDKIKNKDKFTDRLYLYFTQGGKDLYTGEPLNIDDLSSYDIDHILPQSFILDNSLDNRVLTSQRNNRVSKEDQLPGELFGTKMHAFWKRLKAAHLISNKKYYNLTLTPNSISKFNNQGRFINRQLVETRQVIKLAAEILHNRYSEEKGTNIVTIKANLTHHMREKFNFYKNRNVNDYHHAFDAYLTAFVGNWLLQQYPKLKPYFVYGDFAKTEINNLKSFNMLYKFEQAHQLNEKDGKIAKDADALLGYMKNVYHFKKMLVTKKLETNHGALFKQTLYPSPAHDIKKRQLIKPKDNRPTDIYGGYTHEERKYMSLVKVIGKKDNEYRMANVPLLKINKNNDIKEILKSQFSNKKFEIVLPKVLKNQLFSENGALFVIGSKGYKYNANQLVLSDLDMKLLNDLSNNKSIDEVTINQLFKNIVDSTNKYMPLYEIKNLNEVVEKFNNLEFNDKKKTITDFLLATHANPTMSNLKNIGLPSYFGRFTSGNAGIKLSENANVIYQSPTGLFSRKVKISDF

SEQ ID NO: 233 - protein, 1473 aa, Flavobacterium branchiophilum
MAKILGLDLGTNSIGWAVVERENIDFSLIDKGVRIFSEGVKSEKGIESSRAAERTGYRSARKIKYRRKLRKYETLKVLSLNRMCPLSIEEVEEWKKSGFKDYPLNPEFLKWLSTDEESNVNPYFFRDRASKHKVSLFELGRAFYHIAQRRGFLSNRLDQSAEGILEEHCPKIEAIVEDLISIDEISTNITDYFFETGILDSNEKNGYAKDLDEGDKKLVSLYKSLLAILKKNESDFENCKSEIIERLNKKDVLGKVKGKIKDISQAMLDGNYKTLGQYFYSLYSKEKIRNQYTSREEHYLSEFITICKVQGIDQINEEEKINEKKFDGLAKDLYKAIFFQRPLKSQKGLIGKCSFEKSKSRCAISHPDFEEYRMWTYLNTIKIGTQSDKKLRFLTQDEKLKLVPKFYRKNDFNFDVLAKELIEKGSSFGFYKSSKKNDFFYWFNYKPTDTVAACQVAASLKNAIGEDWKTKSFKYQTINSNKEQVSRTVDYKDLWHLLTVATSDVYLYEFAIDKLGLDEKNAKAFSKTKLKKDFASLSLSAINKILPYLKEGLLYSHAVFVANIENIVDENIWKDEKQRDYIKTQISEIIENYTLEKSRFEIINGLLKEYKSENEDGKRVYYSKEAEQSFENDLKKKLVLFYKSNEIENKEQQETIFNELLPIFIQQLKDYEFIKIQRLDQKVLIFLKGKNETGQIFCTEEKGTAEEKEKKIKNRLKKLYHPSDIEKFKKKIIKDEFGNEKIVLGSPLTPSIKNPMAMRALHQLRKVLNALILEGQIDEKTIIHIEMARELNDANKRKGIQDYQNDNKKFREDAIKEIKKLYFEDCKKEVEPTEDDILRYQLWMEQNRSEIYEEGKNISICDIIGSNPAYDIEHTIPRSRSQDNSQMNKTLCSQRFNREVKKQSMPIELNNHLEILPRIAHWKEEADNLTREIEIISRSIKAAATKEIKDKKIRRRHYLTLKRDYLQGKYDRFIWEEPKVGFKNSQIPDTGIITKYAQAYLKSYFKKVESVKGGMVAEFRKIWGIQESFIDENGMKHYKVKDRSKHTHHTIDAITIACMTKEKYDVLAHAWTLEDQQNKKEARSIIEASKPWKTFKEDLLKIEEEILVSHYTPDNVKKQAKKIVRVRGKKQFVAEVERDVNGKAVPKKAASGKTIYKLDGEGKKLPRLQQGDTIRGSLHQDSIYGAIKNPLNTDEIKYVIRKDLESIKGSDVESIVDEVVKEKIKEAIANKVLLLSSNAQQKNKLVGTVWMNEEKRIAINKVRIYANSVKNPLHIKEHSLLSKSKHVHKQKVYGQNDENYAMAIYELDGKRDFELINIFNLAKLIKQGQGFYPLHKKKEIKGKIVFVPIEKRNKRDVVLKRGQQVVFYDKEVENPKDISEIVDFKGRIYIIEGLSIQRIVRPSGKVDEYGVIMLRYFKEARKADDIKQDNFKPDGVFKLGENKPTRKMNHNQFTAFVEGIDFKVLPSGKFEKI

SEQ ID NO: 234 - protein, 933 aa, Mycoplasma iowae
SVRDYSDGPGSEKSPTPYGLWRLNKEGKVEKIGENLWDVLVGKCTIYGNDDSIKDEKTKLRGGKNSPIAEVFNFINDLTNIYLFSSSKLKLNSKTKLSILDEFNISLKTSKPIKSFSEKKLVKHIISTTEFKDINFDDVYGYRIDTSKKPLFTKLENTITIAKWLLDNNVYNELNIYDQEDLIKINNIFVILQKSMDINKRAQLVSDEYKIDLPICLELVKKIKGVMQTHSFSYKAMLEYIPVGIKYNDLETGEDTSINASTYFVDKINNLNTKLLFNGRPRKYIPKNIFEDGIISPTSKRAFIQTINVLNKIIKVYSKDYDIDNIAIELPRDKNTAEERKKISSNQKKAGEEIAEVLKFAGLNVEEYTSKLNSKTKLKLKLLKEQNYKDIYDGQEIDVIDVIKNSNKYHEEHIIPYSLCFIDSRRNKVLTKFENNKQKGNKTPFQWLSSIGKYAEFKDRVEKLFVEQKISKAKKELLLFEQDPRTEMLGFIEKNLSDTRYASKLVFDTFRDFFKVNNPNVKIKVINGALTNYARYNLFATYKDGLLERKGIMKQREFYEHHGIDATILAFLGSNHKINQLLKLSHKFKKQDDNKIYDENTGELIEFTKDFLSDEARKKAMELSKQIFEIPCKFSRPIYRKSNVSFSNETLISMKWIDDKYTKGVKINKLSLVNKDLDLNEYFADYETNEMKNLICYQEDKTLYNKLKNIYDKYNNFVENSNIKPVKNPFINYMISNFSSDDSKIQNFKHIIFYDHKGNKKFVKSLKVCGDEKNLSNIVLRKDQKDIMNSKKIKKSGILESLNPISARIYKDNKGKYITIPINSLVLNWTKKGLEIDNEKLCNILKSKNIFNNQFIEINAGQSIINNENKLFYFVGGGDFKVNKLEIKSQFCDNEIFFPRKQMNISIATIIDNYKLCEVDELGKIYNIRKIVL

SEQ ID NO: 235 - protein, 1358 aa, Acidaminococcus intestini; identical to SEQ ID NO: 99

SEQ ID NO: 236 - protein, 983 aa, Campylobacter jejuni
MARILAFDIGISSIGWAFSENDELKDCGVRIFTKAENPKTGESLALPRRLARSARKRLARRKARLNHLKHLIANEFKLNYEDYQSFDESLAKAYKGSLISPYELRFRALNELLSKQDFARVILHIAKRRGYDDIKNSDDKEKGAILKAIKQNEEKLANYQSVGEYLYKEYFQKFKENSKEFTNVRNKKESYERCIAQSFLKDELKLIFKKQREFGFSFSKKFEEEVLSVAFYKRALKDFSHLVGNCSFFTDEKRAPKNSPLAFMFVALTRIINLLNNLKNTEGILYTKDDLNALLNEVLKNGTLTYKQTKKLLGLSDDYEFKGEKGTYFIEFKKYKEFIKALGEHNLSQDDLNEIAKDITLIKDEIKLKKALAKYDLNQNQIDSLSKLEFKDHLNISFKALKLVTPLMLEGKKYDEACNELNLKVAINEDKKDFLPAFNETYYKDEVTNPVVLRAIKEYRKVLNALLKKYGKVHKINIELAREVGKNHSQRAKIEKEQNENYKAKKDAELECEKLGLKINSKNILKLRLFKEQKEFCAYSGEKIKISDLQDEKMLEIDHIYPYSRSFDDSYMNKVLVFTKQNQEKLNQTPFEAFGNDSAKWQKIEVLAKNLPTKKQKRILDKNYKDKEQKNFKDRNLNDTRYIARLVLNYTKDYLDFLPLSDDENTKLNDTQKGSKVHVEAKSGMLTSALRHTWGFSAKDRNNHLHHAIDAVIIAYANNSIVKAFSDFKKEQESNSAELYAKKISELDYKNKRKFFEPFSGFRQKVLDKIDEIFVSKPERKKPSGALHEETFRKEEFYQSYGGKEGVLKALELGKIRKVNGKIVKNGDMFRVDIFKHKKTNKFYAVPIYTMDFALKVLPNKAVARSKKGEIKDWILMDENYEFCFSLYKDSLILIQTKDMQEPEFVYYNAFTSSTVSLIVSKHDNKFETLSKNQKILFKNANEKEVIAKSIGIQNLKVFEKYIVSALGEVTKAEFRQREDFKK

SEQ ID NO: 237 - protein, 1338 aa, Streptococcus macacae
MTKPYSIGLDIGTNSVGWAVVTDGYKVPAKKMKVLGNTDKSHIKKNLLGALLFDSGNTAKDRRLKRTARRRYTRRRNRILYLQEIFAEEMAKADESFFQRLNESFLTNDDKEFDSHPIFGNKAEEEAHHHKFPTIFHLRKHLADSTEKSDLRLIYLALAHMIKFRGHFLIEGQLKAENTNVQTLFDDFVEVYDKTVEESHLSEISVSSILTEKISKSRRLENLIKYYPTEKKNTLFGNLIALSLGLQPNFKTNFKLSEDAKLQFSKDTYEEDLGELLGKIGDNYADLFISAKNLYDAILLSGILTIDDNTTKAPLSASMIKRYEEHQEDLAQLKKFIRQNLPDQYSEVFSDKTKDGYAGYIDGKTNQEAFYKYIKNMLSKTEGADYFLDKIDREDFLRKQRTFDNGSVPHQIHLQEMHAILRRQGEYYPFLKENQDKIEKILTFRIPYYVGPLARKGSRFAWAEYKADKKVTPWNFDDILDKEKSAEEFITRMTLNDLYLPEEKVLPKHSLVYETFNVYNELTKVKYVNEQGKAIFFDANMKQEIFDHVFKENRKVTKDKLLNYLNKEFEEFRIVNLTGLDKENKAFNSSLGTYHDLRKILDKSFLDDKVNEKIIEDIIQTLTLFEDREMIRQRLQKYSDIFTTQQLKKLERRHYTGWGRLSAKLINGIRDKQSNKTILGYLIDDGYSNRNFMQLINDDSLPFKEEIARAQVIGETDDLNQLVSDIAGSPAIKKGILQSLKIVDELVKVMGHNPANIVIEMARENQTTAKGRRSSQQRYKRLEEAIKNLDHDLNHKILKEHPTDNQALQNDRLFLYYLQNGRDMYTEDPLDINRLSDYDIDHIIPQSFIKDDSIDNKVLVSSAKNRGKSDNVPSEDVVNRMRPFWNKLLSCGLISQRKYSNLTKKELKPDDKAGFIKRQLVETRQITKHVAQILDARFNTKRDENKKVIRDVKIITLKSNLVSQFRKDFKFYKVREINDYHHAHDAYLNAVIGKALLDVYPQLEPEFVYGEYPHFHGYKENKATAKKFFYSNIMNFFKKDDIRTDENGEIVWKKDEHISNIKRVLSYPQVNIVKKVEIQTVGQNGGLFDDNPKSPLEVTPSKLVPLKKELNPKKYGGYQKPTTAYPVLLITDTKQLIPISVMNKKQFEQNPVKFLRDRGYQQVGKNDFIKLPKYTLVDIGDGIKRLWASSKEIHKGNQLVVSKKSQILLYHAHHLDSDLSNDYLQNHNQQFDVLFNEIISFSKKCKLGKEHIQKIENVYSNKKNSASIEELAESFIKLLGFTQLGATSPFNFLGVKLNQKQYKGKKDYILPCTEGTLIRQSITGLYETRVDLSKIGED

SEQ ID NO: 238 - protein, 1265 aa, Mycoplasma ovipneumoniae
MHNKKNITIGFDLGIASIGWAIIDSTTSKILDWGTRTFEERKTANERRAFRSTRRNIRRKAYRNQRFINLILKYKDLFELKNISDIQRANKKDTENYEKIISFFTEIYKKCAAKHSNILEVKVKALDSKIEKLDLIWILHDYLENRGFFYDLEEENVADKYEGIEHPSILLYDFFKKNGFFKSNSSIPKDLGGYSFSNLQWVNEIKKLFEVQEINPEFSEKFLNLFTSVRDYAKGPGSEHSASEYGIFQKDEKGKVFKKYDNIWDKTIGKCSFFVEENRSPVNYPSYEIFNLLNQLINLSTDLKTTNKKIWQLSSNDRNELLDELLKVKEKAKIISISLKKNEIKKIILKDFGFEKSDIDDQDTIEGRKIIKEEPTTKLEVTKHLLATIYSHSSDSNWININNILEFLPYLDAICIILDREKSRGQDEVLKKLTEKNIFEVLKIDREKQLDFVKSIFSNTKFNFKKIGNFSLKAIREFLPKMFEQNKNSEYLKWKDEEIRRKWEEQKSKLGKTDKKTKYLNPRIFQDEIISPGTKNTFEQAVLVLNQIIKKYSKENIIDAIIIESPREKNDKKTIEEIKKRNKKGKGKTLEKLFQILNLENKGYKLSDLETKPAKLLDRLRFYHQQDGIDLYTLDKINIDQLINGSQKYEIEHIIPYSMSYDNSQANKILTEKAENLKKGKLIASEYIKRNGDEFYNKYYEKAKELFINKYKKNKKLDSYVDLDEDSAKNRFRFLTLQDYDEFQVEFLARNLNDTRYSTKLFYHALVEHFENNEFFTYIDENSSKHKVKISTIKGHVTKYFRAKPVQKNNGPNENLNNNKPEKIEKNRENNEHHAVDAAIVAIIGNKNPQIANLLTLADNKTDKKFLLHDENYKENIETGELVKIPKFEVDKLAKVEDLKKIIQEKYEEAKKHTAIKFSRKTRTILNGGLSDETLYGFKYDEKEDKYFKIIKKKLVTSKNEELKKYFENPFGKKADGKSEYTVLMAQSHLSEFNKLKEIFEKYNGFSNKTGNAFVEYMNDLALKEPTLKAEIESAKSVEKLLYYNFKPSDQFTYHDNINNKSFKRFYKNIRIIEYKSIPIKFKILSKHDGGKSFKDTLFSLYSLVYKVYENGKESYKSIPVTSQMRNFGIDEFDFLDENLYNKEKLDIYKSDFAKPIPVNCKPVFVLKKGSILKKKSLDIDDFKETKETEEGNYYFISTISKRFNRDTAYGLKPLKLSVVKPVAEPSTNPIFKEYIPIHLDELGNEYPVKIKEHTDDEKLMCTIK

SEQ ID NO: 239 - protein, 1535 aa, Flavobacterium columnare
MTKILGLDLGTNSIGWAIRDTENEGINQILDKGARIFSEGVKSENGKEISRAAERTAYRSARKIKYRRKLRKYETLKVLSINGMCPLSVEEVEQWKKSGFKEYPLNPEFLDWLRTNEDKNINPYLFRDKASKQKVTLFELGRALYHIAQRRGFLSNRLDQSAEGVFEEHNPQIQNLIEDLDSSNTILNELKEYYINLGIIDETEKSGFKKDLDEGEKKLKSLYNSLVAITKKNANDIETCKQELIARLNKKEDLGKVKGKIKDISQAMLDRNFKTLGQYFFSLYNKERIRNQYTSREEHYLEEFIIICQTQGIEGINTNEKLPEKKFTGLAKDLYRAIFFQRPLKSQKGLIGKCSFEKNKSRCAVSHPDYEEFRMWSYLNTIKIGTQSEKTLRFLTLEEKLKLVPKFYRKSDFNFEVLAKELVEKGASFGYYKSSKKNEFFYWFNYKPTDSVSACVVSASLENAIGKDWKIKTFEYQTRNTEKNEVTKSVDYKDLWHLLSVATSDTYLYDFAIEKLKLEPKNAKAFSKTKLKKDFASLSLAAIAKILPYLKQGLLYSHAVFMANIENIVDADIWKDEEQQKFIQSKIVELVDNYIVEKSKLELINGLLKIYNTEDKEGRKVYYSKEAESLFEADLRKKLVPFYKANIIIEEHEQEIIFQDLFPILMDQLKKQEFIKIGRLDKQIEAFLEGENEEGQIFCNHTDKLKKLYHPSDIEVFKKKTIKDEWGNEKVVLGSPLTTSIKNPMAMRALHQLRKVLNTLIANDQIDEDTRIHIEMARELNDANKRKGIQDFQNENKKFREEAIKEIKKLYLEECHKDVNPTEDDILRYQLWLEQGKCEIYEEGNNISICDIIGSNPSYDIEHTIPRSISQDNSQMNKTLCSLKFNRSIKKQKMPVELSNYNDILPRIAHWKKEAEELTRQIETISRSIKSAATKVAKDKNIRKRHYLTLKRDYILGKYERFTWEEPKVGFKNSQIPDTGIITKYAQAYLKSYFKRVESVKGGAVAEFRKLWGIQESFIDENWWKHYKDKDRDKHTHHTIDAITIACMPKDKYDLLAHAWRLEDEQDKKAAKVLIEQAKPWKTFKEDIEKIETEILVSHFTPDNVKKQSKSIIKNRGKKVYVLKNELPVNFKNKIEGKDYFKLKFDSKILYKIPKKKEKQTDTFYEELPKNYLNGVEGKDYFKINTTGKTFYKIPIFNQGDTIRGSLHQETTYGAIKLPDIDIETKKPLHTDKGGFILKKDIKGNEIVFFVVRKEISKISENDVQNIVDNVVRKKIENAIANSLITFKIVKKKKVAVIKEGVTIWMREPNIEKGIEGIPIKKVRIITNSVKNPIEIKVHSPLSKSRHKHKQKVYGQNDENYAMALYELDGKREFELINNFNLAKLLKQSQSYYPLHKEKEIKGKKILVPIEKRNNKDVILKRGQQVVFYDKTVENPKDISEIIDFRERIYIIEGLTIQRQKDKKTSKVNEYGIIQLRHFKEARKSEEISKDNFKPDGEFKINENKPTRKMNHNQFTAFVEGIDFKVLPSGKFQKI

SEQ ID NO: 240 - protein, 1459 aa, Flavobacterium columnare
MKFNLGLDIGTNSIGWALVNEDYENKKGKIIAAGSRIIPMTQDILDKFGSGAITETQTALRTDYRSKRKLIQRFLLRRERLHRVLNVLDFLPKHYAESIDFEKYFGKFLPNTEPKLAYNQNQFIFQNSFLEMLKEFQEKHPELLTNNKKIPYDWTIYYLRKKALNQRIEKEELAWLLLQFNQKRGYNQLRDEEEESVPNKQVEFYSLKIIDVVADQPKEGRDKRWYSINLENGWTYRRESKTPLFNWEGKTKDFIVTTDLNQDGSIKKDKEGKEKRSFRAPSEGDWTLLKKKTEKEIYESGKTLGTYIYDALLNTPDLKIKGDFIRTIDRSIYKEELQQIINKQKEYHLELNSSKLYKACLEELYPKNEIYKSALKNKDIAYLFINDILYYQRPLKAPKYNIGKCTYESRTFKKEDKKIREYIPAVAKSHPLFQEFRLWQWIKNLKIYEKLSSDNCTDFFLTNEQDFENLFEFLWNKKEIDHKGILEYLVKTKFPDLKPKQVKTKVKEYRWNYVYDHEKDESKTYPCGETYFLLKNKLDKIYNAQDDFLDKERLYNLWHIIYSVTDKKQYEKALAKFALKNHLDTKSFVNTFKRIPPFKNDYAIYSLKAIKKLLPLMRVGKYWNYDDIDPITKQKIQCIITGEENDTISTLVREKTNHFSNENDFKNLPLWLAGYIVYNSHNESSEIEKWKSPQDIDTFLKKFKQHALRNPIVEQVVTETLRVVRDIWSKKGQGKKDFFNEIHIELGKDLKNPVDKRRKLSSTNTKNESTNTRIKALLIELFTQGVENVKPNSPKHQEILKIFEEGALNSGIEIEEDIIKISNTDQPTKKQLELYILWLEHKYKSPYTGQSIPLSKLFTPNYEIEHIIPRSKYYDDNLSNKVICETEINRLKNNQLGYEFINNHEIREVTLEEGKTIRLLSPEQYWNFVTTYYAKNKAKRENLLLKELPVQMVEKQLNDTRYVSKYVMQLLSKIVRKEDGTDNGINSTNILSISGKMTRALKNDWDLNDVWNDLLLYRFERLNTITKTNLFTTYSEQKQKRMPIVPDQYAKGFHKKRLDHRHHALDAIVIACITRNHINYMNNQNIQGEKLKKNAIEKENYREILQKSRLDIRAQLCEKKYNDNDPTKYNWVFIKPWADFTENTKDILESIIPSFKQNLRIINKTVNYYEKYNENGKKVKVRQIKGDNWAIRKPLHKETISGKVHLSYKTPAKGKILTATRKVLDSSMDFKSIEKITDTGIQKILKNYLEYKKSPELAFSPEGIEELNATITKYNNGFHHKPIYKVRIYEEGVKFPLGNKGNKKSKYVEAEKGTNLFFAIYKDQENNRYFETIPFNDVLETLKKGMSAVPEKNQEENTLVFALSPQDLVFVPTLDEIENPDIVDFKNLTKDQTNRIYKMVSSSGKQCFFIKAEVATSIVNKMEFSTSNKMENSIEGIQIKSNCWKLKLDRLGTITRVIK

SEQ ID NO: 241 - protein, 1389 aa, Oenococcus kitaharae
MARDYSVGLDIGTSSVGWAAIDNKYHLIRAKSKNLIGVRLFDSAVTAEKRRGYRTTRRRLSRRHWRLRLLNDIFAGPLTDFGDENFLARLKYSWVHPQDQSNQAHFAAGLLFDSKEQDKDFYRKYPTIYHLRLALMNDDQKHDLREVYLAIHHLVKYRGHFLIEGDVKADSAFDVHTFADAIQRYAESNNSDENLLGKIDEKKLSAALTDKHGSKSQRAETAETAFDILDLQSKKQIQAILKSVVGNQANLMAIFGLDSSAISKDEQKNYKFSFDDADIDEKIADSEALLSDTEFEFLCDLKAAFDGLTLKMLLGDDKTVSAAMVRRFNEHQKDWEYIKSHIRNAKNAGNGLYEKSKKFDGINAAYLALQSDNEDDRKKAKKIFQDEISSADIPDDVKADFLKKIDDDQFLPIQRTKNNGTIPHQLHRNELEQIIEKQGIYYPFLKDTYQENSHELNKITALINFRVPYYVGPLVEEEQKIADDGKNIPDPTNHWMVRKSNDTITPWNLSQVVDLDKSGRRFIERLTGTDTYLIGEPTLPKNSLLYQKFDVLQELNNIRVSGRRLDIRAKQDAFEHLFKVQKTVSATNLKDFLVQAGYISEDTQIEGLADVNGKNFNNALTTYNYLVSVLGREFVENPSNEELLEEITELQTVFEDKKVLRRQLDQLDGLSDHNREKLSRKHYTGWGRISKKLLTTKIVQNADKIDNQTFDVPRMNQSIIDTLYNTKMNLMEIINNAEDDFGVRAWIDKQNTTDGDEQDVYSLIDELAGPKEIKRGIVQSFRILDDITKAVGYAPKRVYLEFARKTQESHLTNSRKNQLSTLLKNAGLSELVTQVSQYDAAALQNDRLYLYFLQQGKDMYSGEKLNLDNLSNYDIDHIIPQAYTKDNSLDNRVLVSNITNRRKSDSSNYLPALIDKMRPFWSVLSKQGLLSKHKFANLTRTRDFDDMEKERFIARSLVETRQIIKNVASLIDSHFGGETKAVAIRSSLTADMRRYVDIPKNRDINDYHHAFDALLFSTVGQYTENSGLMKKGQLSDSAGNQYNRYIKEWIHAARLNAQSQRVNPFGFVVGSMRNAAPGKLNPETGEITPEENADWSIADLDYLHKVMNFRKITVTRRLKDQKGQLYDESRYPSVLHDAKSKASINFDKHKPVDLYGGFSSAKPAYAALIKFKNKFRLVNVLRQWTYSDKNSEDYILEQIRGKYPKAEMVLSHIPYGQLVKKDGALVTISSATELHNFEQLWLPLADYKLINTLLKTKEDNLVDILHNRLDLPEMTIESAFYKAFDSILSFAFNRYALHQNALVKLQAHRDDFNALNYEDKQQTLERILDALHASPASSDLKKINLSSGFGRLFSPSHFTLADTDEFIFQSVTGLFSTQKTVAQLYQETK

SEQ ID NO: 242 - protein, 1425 aa, Prevotella micans
MIQKIFGLDLGTNSIGSSVRNLELGENLTEQLEFFSSDIFGSSVSKNSNGREYSLAGNRSAHRRSRGLNEARRRKLWATLDLLIEHGLCPMSPDSLMQWRTYDKQKGLYRQYPIEDKDFNAWIMLDFNGDGKPDYSSPYQLRRELVVRQFDFDQPIERYKLGRALYHIAQHRGFKSSKGETIADQEKNEKKPIAEEGADIANEMKASETKLSKGLVAYMQENHLKTVGEAFAKLEDERVRIRNNESYRAIRSQYQDEIKEIFTYQKKLSVESELYERLTSEKKGVGTIFYKRPLRSQRGNVGKCTLERNKPRCPIGRPEFEEFRAWTLINNIKIRETAGEPYKQLPIKLRQELLKDCFLSKVKADFKFEDIRKYIEKRLGLSFSNDDKTINYKDSVSIAACPVTVRMKKLLGENWANCRIDGEKRRQAHGKNNNNEHIVSYTEEDIWHVCYNAEDPEEVSNFARKALHWDENKIKELVRLWTSIPQGYAMLSLKAIRNINRMLLLGLKYSDAVLLAKLPDIVPVSDEDILAITKEFLQLEDKLNQEKQINNIVNSLIANYKSKLEENRFADHNYQYQLGEGDDEDINTQIKSHIGAKLWVQIGADEQTKIFQAVRSKYQDFFKSYKRKFVESPKLGELLVAFLTEKFPNVKSKQWERLYHPSQIAIYRPIPVDNDRSKLRLGNPNIGAIKNPTVMRVLNTLRRRVNQLLDDGVISPDETRVVVETARELNDANTKWALDRYNRIRRDENEKIRKILKELNPTTNSISEQDIDKARYIFEQCETDFYTDGKVPYYNKDIKKYKLWLEQGGQCLYTGQTINLTNLFNPNAFDMEHTIPKSISFDNSDQNLTLCESYYNRFIKKNNIPTDMPNYDKDVTINGKEYTAIKPRLQRWKERVDRLSRNVDFWKGQARRAQDKDRKDECIREKHLWDMELAYWKGKLERFTMTDVTDGFKNSQLVDTRVITRHAVLYLKSIFNHVEVQRGETTAEFRKILGLQSIDEKKDRSLHSHHAIDATMLTVIPSAAKRDRMLELFYKIEETKKALKNYNDNNKTGLNLELKGLEEKLDKEKKDCRVGRRVNDLDRFINENIIVSHHTKDQALTPAHRRLRKRGKIVGGKEHPRWQTGDSLRGEIHKASYYGAITQFAKDANGKVLMKDGQAQIDPTIYYVIRRELKYKRSTQDSGFTNWEDLEKVIVDTDLFGLMKGQFPEGTSFKDACEQGFYMIKKGKNGEGDVKTHRIRHVRCKAVKTALRIKEQTYKSSKDYKQFFYAAVGDLYVMCYYTDGKKRDFKIYSLYDISNHRKSGTEDIPKFITDKKGNHLPLDYKLRTGDMVLLYKDNPEELKDLDQVNLKRRLYKVNRFESEGLIILLTHHLSTTTERGCSIGKIENYQNLPTAIRCGIKTIKFLIMGKHRDFVIRNGNIEFKH

SEQ ID NO: 243 - protein, 1473 aa, Mucilaginibacter paludis
MKNILGLDLGTNSIGWALIEKDTDQKNGNILGTGSRIIPMSQDIKDEFGKGNSISQTADRTKFRSVRRLRERHLLRRERLHRVLNVLGFLPKHYADQIDFKKRLGKLVNETEPKLVYDNKNFIFKKSFEAMLSDFNQHQPLLLADGKKVPFDWTIYYLRKKALTEKIEKEELAWLILNFNQKRGYYQLRGEEEEENPNKMVAFHSLKIVEVIADESQKGKAETWYSLILENGWIYRRSSKTPLYDWKGKQRDFIVTTDLNDDGSIKTDKEGLEKRSFRAPVEDDWTLVKKKTEQEINRSHKTVGTYIYENLLQDPKQKIKGKLVRTIEREFYKDELKMILKNQQKFHPELNDEHLYINCVRELYRNNQAHQTILSKKDFVHLFIDDIIFYQRPLRSQKSSISNCTLEFRKYKNENGTDQTDYLKAIPKSHPLFQEFRLWQWIYNLGIYQKEDDTNVTDELIKNIDGYQDLFDFLNNKKEIRQDILIKFLVEQTGLKGKPLSSVVAKYRWNFVEDKIYPCNETGTQIRTRLAKVENTPEDFLTAETEIKLWHIIYSVNDKADYEKALKTFAEKHNLDTHSFVENFKKFPPFKSEYGSFSEKAIKKLLPLIRLGKYWSWENIDKKTQERIEKILTGEFDEAIKSRVRDKAIHLTEEDHFQGLQLWLASYVVYGRHSEADNLDKWHTVADLEDYLAEFRQHSLRNPIVEQVITETLRVVKDIWLQYGQGAKDFFSEIHIELAREMKNTGDERKRLTSLVTDNENTNLRIKVLLSELLNDGNVENVRPYSPMQQEALKIFEDGVLNSDIEIEDDILKISKMAQPTNTELKRYKLWLEQKYRSPYTGQIIPLNRLFTADYEIEHIIPQSRFFDDSFSNKIICESAVNQLKDKQLGLEFIKNHSGTIVKLGMGKTAKILDVESYNEFVKGNYTKNISKRNKLMLEEIPDKMIERQLNDTRYISKFIISALSNIVRSESNDDGFNSKNVLPGNGKITSRLKQDWGMNDIWNELILPRFERMNKITDSAVFTAWNENNQKFLPIVPLEFSKGFQKKRIDHRHHALDALVIAASTREHINLLNNEHAKSDKRFDLNRKLRKFEKVAYNDPKTGKRIEKEVPTIFLKPWETFTVDAKNSLESIIVSFKQNLRVINRATNYSESYNDENGALRLGKDGNPLKEKIKQSKGDSWAIRKPMHKDFVYGKVHLQNVKLPKDKFITAIRKSLDVTFDLKRIETITDTGIQKILKNYLHSKENKVELAFSPEGIEDMNQHIERYNDGKKHQPIHKVRVFEIGSRFSLGESGNKKTKFVEAAKGTNLFFAVYQDDNKGKRNYETIPLNIVIERQKLGLHSVPTEDAKGGKLLFHLSPNDMVYVPTSEELEDNLASVNIKRLNTAQRKRIYKVEKASGVECYFIRQDIAYLIKNYDAKTKIGELESQNKLQTTMTDDRLKITDVCVKLNIDRLGSIAETFLGNQYGASKKT

SEQ ID NO: 244 - protein, 1365 aa, Filifactor alocis
MTKEYYLGLDVGTNSVGWAVTDSQYNLCKFKKKDMWGIRLFESANTAKDRRLQRGNRRRLERKKQRIDLLQEIFSPEICKIDPTFFIRLNESRLHLEDKSNDFKYPLFIEKDYSDIEYYKEFPTIFHLRKHLIESEEKQDIRLIYLALHNIIKTRGHFLIDGDLQSAKQLRPILDTFLLSLQEEQNLSVSLSENQKDEYEEILKNRSIAKSEKVKKLKNLFEISDELEKEEKKAQSAVIENFCKFIVGNKGDVCKFLRVSKEELEIDSFSFSEGKYEDDIVKNLEEKVPEKVYLFEQMKAMYDWNILVDILETEEYISFAKVKQYEKHKTNLRLLRDIILKYCTKDEYNRMFNDEKEAGSYTAYVGKLKKNNKKYWIEKKRNPEEFYKSLGKLLDKIEPLKEDLEVLTMMIEECKNHTLLPIQKNKDNGVIPHQVHEVELKKILENAKKYYSFLTETDKDGYSVVQKIESIFRFRIPYYVGPLSTRHQEKGSNVWMVRKPGREDRIYPWNMEEIIDFEKSNENFITRMTNKCTYLIGEDVLPKHSLLYSKYMVLNELNNVKVRGKKLPTSLKQKVFEDLFENKSKVTGKNLLEYLQIQDKDIQIDDLSGFDKDFKTSLKSYLDFKKQIFGEEIEKESIQNMIEDIIKWITIYGNDKEMLKRVIRANYSNQLTEEQMKKITGFQYSGWGNFSKMFLKGISGSDVSTGETFDIITAMWETDNNLMQILSKKFTFMDNVEDFNSGKVGKIDKITYDSTVKEMFLSPENKRAVWQTIQVAEEIKKVMGCEPKKIFIEMARGGEKVKKRTKSRKAQLLELYAACEEDCRELIKEIEDRDERDFNSMKLFLYYTQFGKCMYSGDDIDINELIRGNSKWDRDHIYPQSKIKDDSIDNLVLVNKTYNAKKSNELLSEDIQKKMHSFWLSLLNKKLITKSKYDRLTRKGDFTDEELSGFIARQLVETRQSTKAIADIFKQIYSSEVVYVKSSLVSDFRKKPLNYLKSRRVNDYHHAKDAYLNIVVGNVYNKKFTSNPIQWMKKNRDTNYSLNKVFEHDVVINGEVIWEKCTYHEDTNTYDGGTLDRIRKIVERDNILYTEYAYCEKGELFNATIQNKNGNSTVSLKKGLDVKKYGGYFSANTSYFSLIEFEDKKGDRARHIIGVPIYIANMLEHSPSAFLEYCEQKGYQNVRILVEKIKKNSLLIINGYPLRIRGENEVDTSFKRAIQLKLDQKNYELVRNIEKFLEKYVEKKGNYPIDENRDHITHEKMNQLYEVLLSKMKKFNKKGMADPSDRIEKSKPKFIKLEDLIDKINVINKMLNLLRCDNDTKADLSLIELPKNAGSFVVKKNTIGKSKIILVNQSVTGLYENRREL

SEQ ID NO: 245 - protein, 1130 aa, Streptococcus macedonicus
MTNGKILGLDIGIASVGVGIIEAKTGKVVHANSRLFSAANAENNAERRGFRGSRRLNRRKKHRVKRVRDLFEKYGIVTDFRNLNLNPYELRVKGLTEQLTNEELFAALRTISKRRGISYLDDAEDDSTGSTDYAKSIDENRRLLKTKTPGQIQLERLEKYGQLRGNFTVYDENGEAHRLINVFSTSDYEKEARKILETQADYNKKITAEFIDDYVEILTQKRKYYHGPGNEKSRTDYGRFRTDGTTLENIFGILIGKCNFYPDEYRASKASYTAQEYNFLNDLNNLKVPTETGKLSTEQKESLVEFAKNTAILGPAKLLKEIAKILDCKVDEIKGYREDDKGKPDLHTFEPYRKLKFNLDSVNIDYLSREVLDKLADILTLNTEREGIEDAIKRNLPNQFTEEQISEIINVRKSQSTAFNKGWHSFSAKLMNELIPELYATSDEQMTILTRLEKFKVKKKSSKNIKTIDEKEITDEIYNPVVAKSVRQTIKIINAAVKKYGDFDKIVIEMPRDKNADDEKKFINKRNKENKKEKDDALKRAAYLYNGTDKLPDEVFHGNKQLETKIRLWYQQGERCLYSGKPIPIQELVHNSNNFEIDHILPLSLSFDDSLANKVLVYSWTNQEKGQKTPYQVIDSMDAAWSFREMKEYVLKQKGLGKKKRDYLLTTENIDKIEVKKKFIERNLVDTRYASRVVLNSLQSALRELGKDTKVSVVRGQFTSQLRRKWKIDKSRETYHHHAVDALIIAASSQLKLWEKQDNPMFVDYGNNQVVDKQTGEILSVSDNEYKELVFQPPYQGFVNTISSKGFEDEILFSYQVDSKYNRKVSDATIYSTRKAKIGKDKKEETYVLGKIKDIYSQNGFDTFVKKYNKDKTQFLMYQKDPLTWENVIEVILGDYPTTKKSEDGKNDVKCNPFEEYRRENGLICKYSKKGKGTPIKSLKYYDKKLGNCIDITPEESRNKVILQSINPWRADVYFNPETLKYELMGLKYSDLSFEKGTGNYHISQEKYDAIKEKEGIGKKSEFKFTLYRNDLILIKDIASGEQEIYRFLSRTMPNVNHYVELKPYDKEKFDNVQELVEALGEADKVGRCIKSLNKPNISIYKVRTDVLGNKYFVKKEGDKPKLDFKNNKK

SEQ ID NO: 246 - protein, 1367 aa, Streptococcus pyogenes
MDKKYSIGLDIGTNSVGWAVITDDYKVPSKKFKVLGNTDRHSIKKNLIGALLFGSGETAEATRLKRTARRRYTRRKNRICYLQEIFSNEMAKVDDSFFHRLEESFLVEEDKKHERHPIFGNIVDEVAYHEKYPTIYHLRKKLADSTDKADLRLIYLALAHMIKFRGHFLIEGDLNPDNSDVDKLFIQLVQIYNQLFEENPINASRVDAKAILSARLSKSRRLENLIAQLPGEKRNGLFGNLIALSLGLTPNFKSNFDLAEDAKLQLSKDTYDDDLDNLLAQIGDQYADLFLAAKNLSDAILLSDILRVNSEITKAPLSASMIKRYDEHHQDLTLLKALVRQQLPEKYKEIFFDQSKNGYAGYIDGGASQEEFYKFIKPILEKMDGTEELLVKLNREDLLRKQRTFDNGSIPHQIHLGELHAILRRQEDFYPFLKDNREKIEKILTFRIPYYVGPLARGNSRFAWMTRKSEETITPWNFEEVVDKGASAQSFIERMTNFDKNLPNEKVLPKHSLLYEYFTVYNELTKVKYVTEGMRKPAFLSGEQKKAIVDLLFKTNRKVTVKQLKEDYFKKIECFDSVEISGVEDRFNASLGAYHDLLKIIKDKDFLDNEENEDILEDIVLTLTLFEDRGMIEERLKTYAHLFDDKVMKQLKRRRYTGWGRLSRKLINGIRDKQSGKTILDFLKSDGFANRNFMQLIHDDSLTFKEDIQKAQVSGQGHSLHEQIANLAGSPAIKKGILQTVKIVDELVKVMGHKPENIVIEMARENQTTQKGQKNSRERMKRIEEGIKELGSQILKEHPVENTQLQNEKLYLYYLQNGRDMYVDQELDINRLSDYDVDHIVPQSFIKDDSIDNKVLTRSDKNRGKSDNVPSEEVVKKMKNYWRQLLNAKLITQRKFDNLTKAERGGLSELDKAGFIKRQLVETRQITKHVAQILDSRMNTKYDENDKLIREVKVITLKSKLVSDFRKDFQFYKVREINNYHHAHDAYLNAVVGTALIKKYPKLESEFVYGDYKVYDVRKMIAKSEQEIGKATAKYFFYSNIMNFFKTEITLANGEIRKRPLIETNGETGEIVWDKGRDFATVRKVLSMPQVNIVKKTEVQTGGFSKESILPKRNSDKLIARKKDWDPKKYGGFDSPTVAYSVLVVAKVEKGKSKKLKSVKELLGITIMERSSFEKNPIDFLEAKGYKEVKKDLIIKLPKYSLFELENGRKRMLASAGELQKGNELALPSKYVNFLYLASHYEKLKGSPEDNEQKQLFVEQHKHYLDEIIEQISEFSKRVILADANLDKVLSAYNKHRDKPIREQAENIIHLFTLTNLGAPAAFKYFDTTIDRKRYTSTKEVLDATLIHQSITGLYETRIDLSQLGGD

SEQ ID NO: 247 - protein, 1233 aa, Mycoplasma canis
MEKKRKVTLGFDLGIASVGWAIVDSETNQVYKLGSRLFDAPDTNLERRTQRGTRRLLRRRKYRNQKFYNLVKRTEVFGLSSREAIENRFRELSIKYPNIIELKTKALSQEVCPDEIAWILHDYLKNRGYFYDEKETKEDFDQQTVESMPSYKLNEFYKKYGYFKGALSQPTESEMKDNKDLKEAFFFDFSNKEWLKEINYFFNVQKNILSETFIEEFKKIFSFTRDISKGPGSDNMPSPYGIFGEFGDNGQGGRYEHIWDKNIGKCSIFTNEQRAPKYLPSALIFNFLNELANIRLYSTDKKNIQPLWKLSSVDKLNILLNLFNLPISEKKKKLTSTNINDIVKKESIKSIMISVEDIDMIKDEWAGKEPNVYGVGLSGLNIEESAKENKFKFQDLKILNVLINLLDNVGIKFEFKDRNDIIKNLELLDNLYLFLIYQKESNNKDSSIDLFIAKNESLNIENLKLKLKEFLLGAGNEFENHNSKTHSLSKKAIDEILPKLLDNNEGWNLEAIKNYDEEIKSQIEDNSSLMAKQDKKYLNDNFLKDAILPPNVKVTFQQAILIFNKIIQKFSKDFEIDKVVIELAREMTQDQENDALKGIAKAQKSKKSLVEERLEANNIDKSVFNDKYEKLIYKIFLWISQDFKDPYTGAQISVNEIVNNKVEIDHIIPYSLCFDDSSANKVLVHKQSNQEKSNSLPYEYIKQGHSGWNWDEFTKYVKRVFVNNVDSILSKKERLKKSENLLTASYDGYDKLGFLARNLNDTRYATILFRDQLNNYAEHHLIDNKKMFKVIAMNGAVTSFIRKNMSYDNKLRLKDRSDFSHHAYDAAIIALFSNKTKTLYNLIDPSLNGIISKRSEGYWVIEDRYTGEIKELKKEDWTSIKNNVQARKIAKEIEEYLIDLDDEVFFSRKTKRKTNRQLYNETIYGIATKTDEDGITNYYKKEKFSILDDKDIYLRLLREREKFVINQSNPEVIDQIIEIIESYGKENNIPSRDEAINIKYTKNKINYNLYLKQYMRSLTKSLDQFSEEFINQMIANKTFVLYNPTKNTTRKIKFLRLVNDVKINDIRKNQVINKFNGKNNEPKAFYENINSLGAIVFKNSANNFKTLSINTQIAIFGDKNWDIEDFKTYNMEKIEKYKEIYGIDKTYNFHSFIFPGTILLDKQNKEFYYISSIQTVRDIIEIKFLNKIEFKDENKNQDTSKTPKRLMFGIKSIMNNYEQVDISPFGINKKIFE

SEQ ID NO: 248 - protein, 1375 aa, Lactobacillus johnsonii
MTKIKDDYIVGLDIGTDSCGWVAMNSNNDILKLQGKTAIGSRLFEGGKSAAERRLFRTTHRRIKRRRWRLKLLEEFFDPYMAEVDPYFFARLKESGLSPLDKRKTVSSIVFPTSAEDKKFYDDYPTIYHLRYKLMTEDEKFDLREVYLAIHHIIKYRGNFLYNTSVKDFKASKIDVKSSIEKLNELYENLGLDLNVEFNISNTAEIEKVLKDKQIFKRDKVKKIAELFAIKTDNKEQSKRIKDISKQVANAVLGYKTRFDTIALKEISKDELSDWNFKLSDIDADSKFEALMGNLDENEQAILLTIKELFNEVTLNGIVEDGNTLSESMINKYNDHRDDLKLLKEVIENHIDRKKAKELALAYDLYVNNRHGQLLQAKKKLGKIKPRSKEDFYKVVNKNLDDSRASKEIKKKIELDSFMPKQRTNANGVIPYQLQQLELDKIIENQSKYYPFLKEINPVSSHLKEAPYKLDELIRFRVPYYVGPLISPNESTKDIQTKKNQNFAWMIRKEEGRITPWNFDQKVDRIESANKFIKRMTTKDTYLFGEDVLPANSLLYQKFTVLNELNNIRINGKRISVDLKQEIYENLFKKHTTVTVKKLENYLKENHNLVKVEIKGLADEKKFNSGLTTYNRFKNLNIFDNQIDDLKYRNDFEKIIEWSTIFEDKSIYKEKLRSIDWLNEKQINALSNIRLQGWGRLSKKLLAQLHDHNGQTIIEQLWDSQNNFMQIVTQADFKDAIAKANQNLLVATSVEDILNNAYTSPANKKAIRQVIKVVDDIVKAASGKVPKQIAIEFTRDADENPKRSQTRGSKLQKVYKDLSTELASKTIAEELNEAIKDKKLVQDKYYLYFMQLGRDAYTGEPINIDEIQKYDIDHILPQSFIKDDALDNRVLVSRAVNNGKSDNVPVKLFGNEMAANLGMTIRKMWEEWKNIGLISKTKYNNLLTDPDHINKYKSAGFIRRQLVETSQIIKLVSTILQSRYPNTEIITVKAKYNHYLREKFDLYKSREVNDYHHAIDAYLSAICGNLLYQNYPNLRPFFVYGQYKKFSSDPDKEKAIFNKTRKFSFISQLLKNKSENSKEIAKKLKRAYQFKYMLVSRETETRDQEMFKMTVYPRFSHDTVKAPRNLIPKKMGMSPDIYGGYTNNSDAYMVIVRIDKKKGTEYKILGIPTRELVNLKKAEKEDHYKSYLKEILTPRILYNKNGKRDKKITSFEIVKSKIPYKQVIQDGDKKFMLGSSTYVYNAKQLTLSTESMKAITNNFDKDSDENDALIKAYDEILDKVDKYLPLFDINKFREKLHSGREKFIKLSLEDKKDTILKVLEGLHDNAVMTKIPTIGLSTPLGFMQFPNGVILSENAKLIYQSPTGLFKKSVKISDL

SEQ ID NO: 249 - protein, 1053 aa, Staphylococcus aureus
MKRNYILGLDIGITSVGYGIIDYETRDVIDAGVRLFKEANVENNEGRRSKRGARRLKRRRRHRIQRVKKLLFDYNLLTDHSELSGINPYEARVKGLSQKLSEEEFSAALLHLAKRRGVHNVNEVEEDTGNELSTKEQISRNSKALEEKYVAELQLERLKKDGEVRGSINRFKTSDYVKEAKQLLKVQKAYHQLDQSFIDTYIDLLETRRTYYEGPGEGSPFGWKDIKEWYEMLMGHCTYFPEELRSVKYAYNADLYNALNDLNNLVITRDENEKLEYYEKFQIIENVFKQKKKPTLKQIAKEILVNEEDIKGYRVTSTGKPEFTNLKVYHDIKDITARKEIIENAELLDQIAKILTIYQSSEDIQEELTNLNSELTQEEIEQISNLKGYTGTHNLSLKAINLILDELWHTNDNQIAIFNRLKLVPKKVDLSQQKEIPTTLVDDFILSPVVKRSFIQSIKVINAIIKKYGLPNDIIIELAREKNSKDAQKMINEMQKRNRQTNERIEEIIRTTGKENAKYLIEKIKLHDMQEGKCLYSLEAIPLEDLLNNPFNYEVDHIIPRSVSFDNSFNNKVLVKQEENSKKGNRTPFQYLSSSDSKISYETFKKHILNLAKGKGRISKTKKEYLLEERDINRFSVQKDFINRNLVDTRYATRGLMNLLRSYFRVNNLDVKVKSINGGFTSFLRRKWKFKKERNKGYKHHAEDALIIANADFIFKEWKKLDKAKKVMENQMFEEKQAESMPEIETEQEYKEIFITPHQIKHIKDFKDYKYSHRVDKKPNRELINDTLYSTRKDDKGNTLIVNNLNGLYDKDNDKLKKLINKSPEKLLMYHHDPQTYQKLKLIMEQYGDEKNPLYKYYEETGNYLTKYSKKDNGPVIKKIKYYGNKLNAHLDITDDYPNSRNKVVKLSLKPYRFDVYLDNGVYKFVTVKNLDVIKKENYYEVNSKCYEEAKKLKKISNQAEFIASFYNNDLIKINGELYRVIGVNNDLLNRIEVNMIDITYREYLENMNDKRPPRIIKTIASKTQSIKKYSTDILGNLYEVKSKKHPQIIKKG

SEQ ID NO: 250 - protein, 1063 aa, Simonsiella muelleri
MEKFHYVLGLDLGIASVGWAAIEIDKETETSIGLLDCGVRTFERAEVPKTGDSLAKARREARSTRRLIRRRSHRLLRLKRLLKREIFRQPETFKDLPINAWQLRVKGLDSRLNEYEWAAVLLHLVKHRGYLSQRKSEMSETDSKSEMGRLLAGVAENHQLLQQEQYRTPAELALKKFVKHFRNKGGDYAHTFNRLDLQAELHLLFQKQRELGNPFTSPELERQVDDLLMTQRSALQGDAILKMLGHCGFEPEQFKAAKNTFSAERFIWLTKLNNLRIQDQGKERALTADERTKLLDEPYKKSKLTYAQVRKLLSLPQTAIFKGLRYDLEHDKKAENSTLMEMKSYHNIRQTLEKSGLKTEWQSIATQPEILDAIGTAFSIYKTDEDISHELKTCRLPENVLNELLKNINFDGFIQLSLTALRKILPLMEQGYRYDEACTQIYGNHHSGSLQQESKQFLPHIPIDDVRNPVVFRTLTQARKVVNAIIRRYGSPARVHIEMARELGKSKSDRDRIEKQQQKNKKERENAVAKFKEDFPDFVGEPRGKDILKMRLYEQQHGKCLYSGHDIDINRLNEKGYVEIDHALPFSRTWDDSQNNKVLVLGSENQNKRNQTPDEYLDGANNSQRWLEFQARVQTCHFSYGKKQRIQLAKLDDETEKGFLERNLNDTRYIARFMCQFVQENLYLTGKGKRLVFASNGGMTATLRNLWGLRKVREDNDRHHALDAIVVACSTASMQQKITKAFQRHESIEYVDTETGEVKFRIPQPWDFFRQEVMIRVFSDQPCEDLVEKLSARPEALHDNVTPLFVSRAPNRKMSGQGHLETIKSAKRLSEENSMVKKPLTTLKLKDIPEIVGYPSREPQLYAALKTRLETHDDDPIKAFAKPFYKPNKNGELGALVRSVRVKGVQNTGVMVHDGKGIADNATMVRVDVYTKAGKNYLVPVYVWQVAQGILPNRAVTSGKSEADWDLIDESFEFKFSLSRGDLVEMISNKGRIFGYYNGLDRANGSIGIREHDLEKSKGKDGVHRVGVKTATAFNKYHVDPLGKEIHRCSSEPRPTLKIKSKK

SEQ ID NO: 251 - protein, 1509 aa, Psychroflexus torquis
MKRILGLDLGTNSIGWSLIEHDFKNKQGQIEGLGVRIIPMSQEILGKFDAGQSISQTADRTKYRGVRRLYQRDNLRRERLHRVLKILDFLPKHYSESIDFQDKVGQFKPKQEVKLNYRKNEKNKHEFVFMNSFIEMVSEFKNAQPELFYNKGNGEETKIPYDWTLYYLRKKALTQQITKEELAWLILNFNQKRGYYQLRGEDIDEDKNKKYMQLKVNNLIDSGAKVKGKVLYNVIFDNGWKYEKQIVNKDEWEGRTKEFIITTKTLKNGNIKRTYKAVDSEIDWAAIKAKTEQDINKANKTVGEYIYESLLDNPSQKIRGKLVKTIERKFYKEEFEKLLSKQIELQPELFNESLYKACIKELYPRNENHQSNNKKQGFEYLFTEDIIFYQRPLKSQKSNISGCQFEHKIYKQKNKKTGKLELIKEPIKTISRSHPLFQEFRIWQWLQNLKIYNKEKIENGKLEDVTTQLLPNNEAYVTLFDFLNTKKELEQKQFIEYFVKKKLIDKKEKEHFRWNFVEDKKYPFSETRAQFLSRLAKVKGIKNTEDFLNKNTQVGSKENSPFIKRIEQLWHIIYSVSDLKEYEKALEKFAEKHNLEKDSFLKNFKKFPPFVSDYASYSKKAISKLLPIMRMGKYWSESAVPTQVKERSLSIMERVKVLPLKEGYSDKDLADLLSRVSDDDIPKQLIKSFISFKDKNPLKGLNTYQANYLVYGRHSETGDIQHWKTPEDIDRYLNNFKQHSLRNPIVEQVVMETLRVVRDIWEHYGNNEKDFFKEIHVELGREMKSPAGKREKLSQRNTENENTNHRIREVLKELMNDASVEGGVRDYSPSQQEILKLYEEGIYQNPNTNYLKVDEDEILKIRKKNNPTQKEIQRYKLWLEQGYISPYTGKIIPLTKLFTHEYQIEHIIPQSRYYDNSLGNKIICESEVNEDKDNKTAYEYLKVEKGSIVFGHKLLNLDEYEAHVNKYFKKNKTKLKNLLSEDIPEGFINRQLNDSRYISKLVKGLLSNIVRENGEQEATSKNLIPVTGVVTSKLKQDWGLNDKWNEIIAPRFKRLNKLTNSNDFGFWDNDINAFRIQVPDSLIKGFSKKRIDHRHHALDALVVACTSRNHTHYLSALNAENKNYSLRDKLVIKNENGDYTKTFQIPWQGFTIEAKNNLEKTVVSFKKNLRVINKTNNKFWSYKDENGNLNLGKDGKPKKKLRKQTKGYNWAIRKPLHKETVSGIYNINAPKNKIATSVRTLLTEIKNEKHLAKITDLRIRETILPNHLKHYLNNKGEANFSEAFSQGGIEDLNKKITTLNEGKKHQPIYRVKIFEVGSKFSISEDENSAKSKKYVEAAKGTNLFFAIYLDEENKKRNYETIPLNEVITHQKQVAGFPKSERLSVQPDSQKGTFLFTLSPNDLVYVPNNEELENRDLFNLGNLNVEQISRIYKFTDSSDKTCNFIPFQVSKLIFNLKKKEQKKLDVDFIIQNEFGLGSPQSKNQKSIDDVMIKEKCIKLKIDRLGNISKA

SEQ ID NO: 252 - protein, 1112 aa, Staphylococcus simulans
MLVGLKFKQSILFENMENAEDIKESATGSDAISLSDDYYENLSEFLTDEQLNFIESANTFFMGIMLDRILKGATSISAAKVRDYKIFKSQLKLIKDIVYQNKYDKYHEFFVTSKEDMRAYQENPDAKNFGKLSKFDQYLIHSKDQYAKLMKDLKGLVPKEYTEVLNLIDEQKFLVVQNTTDNASIPYQNNVFEAENILRNQQKYYPEITEEMIGKVINLISFRIPYYVGPLTNKNGQSDFAWMIRKSDEQTLPWNFDKVIDKSKSAEKFIRRMTSKCTYLLEEDVLPKHSLLYQEMEVLNELNNVQLRGENEPKHRIHRLDPKVKQFIYHNLFQKKKNVTHKDLITLLQNSEHRNTLNKTSGQKLKVFGTQNDSKFASKLSTYNDMKAILGSVENKRQMIEELVLWITIFEDKAILKQKIGEKYPNITEKQLNQIVKLNYSGWGRLSEKLLTKEVNGRSLIDLMYSTENNFMEIITDKTLGFDCFIKNSNKVKNAKISYKDVAELRTSPALKKGIWNAIKMVREISNLFGAPEKIIIEFATEDQAKGKRQKSRSELWDDLVKKNNLKRNKEFEGLFEELKAYPDLDFSNPKLWLYIHQNGKCMYTKKPIDLERLMSDTNNQLYEIDHILPRTFVKDDSINNKVLVIQSANQKKSGDKMPLEIFDNHVLVPFWKMLYENDLISSSKLSKLMKKEFNDLDKEGFIQRQLVETRQIISHVSDFLTEEYPSTTVVPMKANVVSELRRKFDIPKIRQLNDWHHAVDAYLNGFVYQAARVFYPKVNLFEFNFKWEKVREKWRQLGEFTENNKKREFFLFKRMENYVNEYGEGMISKLIFDLDNFKFNYSRKVESTESAFYKQSAFSPKNTTAQYDSDKNKTAIYKEMKNKRGIVVSYTYVKKDQELIGYGVFNETVFEYVNNADVDMNTRALKIVRKAFPKLDIKKAQYLFSINKGDALLVNGHPFLFVSAYERINGKQLEFDIAMQRKIKQALSPYNNMTEQEKVEFYNQFAEKVIEEFRNSIGLQSRDRKVNLIKNLFNNTEKSNDSMTQSILEVLKMTKVSAERSKELKIRWNGQTPNTFIDTKNNAEIQYKSITGLKTTKPKSIFKLAESKNEL

SEQ ID NO: 253 - protein, 1274 aa, Mycoplasma gallisept
MNINMNNSIKSKPEVTIGLDLGVGSVGWAIVDNETNIIHHLGSRLFSQAKTAEDRRSFRGVRRLIRRRKYKLKRFVNLIWKYNSYFGFKNKEDILNNYQEQQKLHNTVLNLKLEALNAKIDPKALSWILHDYLKNRGHFYEDNRDFNVYPTEELANYFDEFGYYKGIIDSKNDDDDKLEEGLTKYKFSNQHWLEEVKKVLSNQTGLPEKFKEEYESLFSYVRNYSEGPGSINSVSPYGIYHLDEKEGKVVQKYNNIWDKTIGKCSIFPDEYRAPKNSPIAMIFNEINELSTIRSYSIYLTGWFINQEFKKAYLNKLLDLLIKTNSEKPIDARQFKKLREETIAESIGKETLKDVESEEKLEKDDHKWKLKGLKLNTNGKIQYNDLSSLAKFVHKLKQHLKLDFLLEDQYTPLDKINFLQSLYVYLGKHLRYSNRVDSANLKEFSDSSRLFERVLQEQKDGLFKLFEQTDKDDEKILTQTHSLSTKAMLLAITRMTNLDNDEDNQKNNDKGWNFEAIKNFDQKFIDITKTNNNLSLKQDKRYLDDQFINDAILSPGVKRILREATKVFNAILKQFSEEYDVTKVVIELARELSEEKELENTKNYKKLIKKNGDKISEGLKALGIAEDKIEEILKSPTKSYKVLLWLQQDHIDPYSQKEIAFDDILTKTEKTEIDHIIPYSISFDDSSSNKLLVLAESNQAKSNQTPYEFINSGKAEITWEVYEAYCHKFKNGDSSLLDSTQRSKKFAKMMKTDTSSKYDIGFLARNLNDTRYATIVFRDALKDYANNHLVEDKPMFKVVCINGGVTSFLRKNFDPKSWYAKKDRDKNIHHAVDASIISIFSNETKTLFNQLTKFADYKLFKNTDGSWKKIDPKTGVVSEVTDENWKQIRVRNQVSEIAKVIDKYIQDSNIERKARYSRKIENKTNISLFNDTVYSAKKVGYEDQIKRKNLKTLDIHESAEENKNSKVKKQFVYRKLVNVSLLNNDKLADLFAEKEDILMYRANPWVINLAEQIFNEYTENKKIKSQNVFEKYMLDLTKEFPEKFSEAFVKSMIRNKTAIIYNVEKDVVHRIKRLKILSSELKENKWSNVIIRSKNESGTKLSYQDTINSIALMIMRSIDPTAKKQYIRVPLNTLNLHLGDQDFDLHNIDAYLKKPKFVKYLKANEIGDEYKPWRVLTSGTLLIHKKDKKLMYISSFQNLNDLIEIKNLIETEYKENVDSDPKKKKKASQILRSLSVILNDYILLDAKYNFDILGLSKNKIDEILNSKLDLDKIAK

SEQ ID NO: 254 - protein, 1122 aa, Artificial Sequence; identical to SEQ ID NO: 23
  Synthetic Sequence

SEQ ID NO: 255 - protein, 1236 aa, Artificial Sequence; identical to SEQ ID NO: 21
  Synthetic Sequence

SEQ ID NO: 256 - protein, 1059 aa, Artificial Sequence; identical to SEQ ID NO: 15
  Synthetic Sequence

SEQ ID NO: 257 - protein, 1166 aa, Artificial Sequence; identical to SEQ ID NO: 39
  Synthetic Sequence

SEQ ID NO: 258 - protein, 1149 aa, Artificial Sequence; identical to SEQ ID NO: 37
  Synthetic Sequence

SEQ ID NO: 259 - protein, 1314 aa, Artificial Sequence; identical to SEQ ID NO: 27
  Synthetic Sequence

SEQ ID NO: 260 - protein, 1064 aa, Artificial Sequence; identical to SEQ ID NO: 38
  Synthetic Sequence

SEQ ID NO: 261 - protein, 1401 aa, Artificial Sequence
  Synthetic Sequence
MDKKYSIGLDIGTNSVGWAVITDEYKVPSKKFKVLGNTDRHSIKKNLIGALLFDSGETAEATRLKRTARRRYTRRKNRICYLQEIFSNEMAKVDDSFFHRLEESFLVEEDKKHERHPIFGNIVDEVAYHEKYPTIYHLRKKLVDSTDKADLRLIYLALAHMIKFRGHFLIEGDLNPDNSDVDKLFIQLVQTYNQLFEENPINASGVDAKAILSARLSKSRRLENLIAQLPGEKKNGLFGNLIALSLGLTPNFKSNFDLAEDAKLQLSKDTYDDDLDNLLAQIGDQYADLFLAAKNLSDAILLSDILRVNTEITKAPLSASMIKRYDEHHQDLTLLKALVRQQLPEKYKEIFFDQSKNGYAGYIDGGASQEEFYKFIKPILEKMDGTEELLVKLNREDLLRKQRTFDNGSIPHQIHLGELHAILRRQEDFYPFLKDNREKIEKILTFRIPYYVGPLARGNSRFAWMTRKSEETITPWNFEEVVDKGASAQSFIERMTNFDKNLPNEKVLPKHSLLYEYFTVYNELTKVKYVTEGMRKPAFLSGEQKKAIVDLLFKTNRKVTVKQLKEDYFKKIECFDSVEISGVEDRFNASLGTYHDLLKIIKDKDFLDNEENEDILEDIVLTLTLFEDREMIEERLKTYAHLFDDKVMKQLKRRRYTGWGRLSRKLINGIRDKQSGKTILDFLKSDGFANRNFMQLIHDDSLTFKEDIQKAQVSGQGDSLHEHIANLAGSPAIKKGILQTVKVVDELVKVMGRHKPENIVIEMARENQTTQKGQKNSRERMKRIEEGIKELGSQILKEHPVENTQLQNEKLYLYYLQNGRDMYVDQELDINRLSDYDVDHIVPQSFLKDDSIDNKVLTRSDKNRGKSDNVPSEEVVKKMKNYWRQLLNAKLITQRKFDNLTKAERGGLSELDKAGFIKRQLVETRQITKHVAQILDSRMNTKYDENDKLIREVKVITLKSKLVSDFRKDFQFYKVREINNYHHAHDAYLNAVVGTALIKKYPKLESEFVYGDYKVYDVRKMIAKSEQEIGKATAKYFFYSNIMNFFKTEITLANGEIRKRPLIETNGETGEIVWDKGRDFATVRKVLSMPQVNIVKKTEVQTGGFSKESILPKRNSDKLIARKKDWDPKKYGGFDSPTVAYSVLVVAKVEKGKSKKLKSVKELLGITIMERSSFEKNPIDFLEAKGYKEVKKDLIIKLPKYSLFELENGRKRMLASAGELQKGNELALPSKYVNFLYLASHYEKLKGSPEDNEQKQLFVEQHKHYLDEIIEQISEFSKRVILADANLDKVLSAYNKHRDKPIREQAENIIHLFTLTNLGAPAAFKYFDTTIDRKRYTSTKEVLDATLIHQSITGLYETRIDLSQLGGDAYPYDVPDYASLGSGSPKKKRKVEDPKKKRKVD

SEQ ID NO: 262 - protein, 1368 aa, Artificial Sequence
  Synthetic Sequence
MDKKYSIGLAIGTNSVGWAVITDDYKVPSKKLKGLGNTDRHGIKKNLIGALLFDSGETAEATRLKRTARRRYTRRKNRICYLQEIFSNEMAKVDDSFFHRLEESFLVEEDKKHERHPIFGNIVDEVAYHEKYPTIYHLRKKLADSTDKVDLRLIYLALAHMIKFRGHFLIEGDLNPDNSDVDKLFIQLVQTYNQLFEENPINASRVDAKAILSARLSKSRRLENLIAQLPGEKKNGLFGNLIALSLGLTPNFKSNFDLAEDAKLQLSKDTYDDDLDNLLAQIGDQYADLFLAAKNLSDATLLSDILRVNSEITKAPLSASMIKRYDEHHQDLTLLKALVRQQLPEKYKEIFFDQSKNGYAGYIDGGASQEEFYKFIKPILEKMDGTEELLAKLNREDLLRKQRTFDNGSIPYQIHLGELHAILRRQEDFYPFLKDNREKIEKILTFRIPYYVGPLARGNSRFAWMTRKSEETITPWNFEEVVDKGASAQSFIERMTNFDKNLPNEKVLPKHSLLYEYFTVYNELTKVKYVTEGMRKPAFLSGEQKKAIVDLLFKTNRKVTVKQLKEDYFKKIECFDSVEISGVEDRFNASLGTYHDLLKIIKDKDFLDNEENEDILEDIVLTLTLFEDREMIEERLKTYAHLFDDKVMKQLKRRRYTGWGRLSRKLINGIRDKQSGKTILDFLKSDGFANRNFMQLIHDDSLTFKEDIQKAQVSGQGDSLHEHIANLAGSPAIKKGILQTVKVVDELVKVMGRHKPENIVIEMARENQTTQKGQKNSRERMKRIEEGIKELGSDILKEYPVENTQLQNEKLYLYYLQNGRDMYVDQELDINRLSDYDVDHIVPQSFLKDDSIDNKVLTRSDKNRGKSDNVPSEEVVKKMKNYWRQLLNAKLITQRKFDNLTKAERGGLSELDKVGFIKRQLVETRQITKHVAQILDSRMNTKYDENDKLIREVRVITLKSKLVSDFRKDFQFYKVREINNYHHAHDAYLNAVVGTALIKKYPKLESEFVYGDYKVYDVRKMIAKSEQEIGKATAKYFFYSNIMNFFKTEITLANGEIRKRPLIETNGETGEIVWDKGRDFATVRKVLSMPQVNIVKKTEVQTGGFSKESILPKRNSDKLIARKKDWDPKKYGGFDSPTVAYSVLVVAKVEKGKSKKLKSVKELLGITIMERSSFEKDPIDFLEAKGYKEVRKDLIIKLPKYSLFELENGRKRMLASAGELQKGNELALPSKYVNFLYLASHYEKLKGSPEDNEQKQLFVEQHKHYLDEIIEQISEFSKRVILADANLDKVLSAYNKHRDKPIREQAENIIHLFTLTNLGAPAAFKYFDTTIDRKRYTSTKEVLDATLIHQSITGLYETRIDLSQLGGD

SEQ ID NO: 263 - protein, 1368 aa, Artificial Sequence
  Synthetic Sequence
MDKKYSIGLDIGTNSVGWAVITDDYKVPSKKLKGLGNTDRHGIKKNLIGALLFDSGETAEATRLKRTARRRYTRRKNRICYLQEIFSNEMAKVDDSFFHRLEESFLVEEDKKHERHPIFGNIVDEVAYHEKYPTIYHLRKKLADSTDKVDLRLIYLALAHMIKFRGHFLIEGDLNPDNSDVDKLFIQLVQTYNQLFEENPINASRVDAKAILSARLSKSRRLENLIAQLPGEKKNGLFGNLIALSLGLTPNFKSNFDLAEDAKLQLSKDTYDDDLDNLLAQIGDQYADLFLAAKNLSDATLLSDILRVNSEITKAPLSASMIKRYDEHHQDLTLLKALVRQQLPEKYKEIFFDQSKNGYAGYIDGGASQEEFYKFIKPILEKMDGTEELLAKLNREDLLRKQRTFDNGSIPYQIHLGELHAILRRQEDFYPFLKDNREKIEKILTFRIPYYVGPLARGNSRFAWMTRKSEETITPWNFEEVVDKGASAQSFIERMTNFDKNLPNEKVLPKHSLLYEYFTVYNELTKVKYVTEGMRKPAFLSGEQKKAIVDLLFKTNRKVTVKQLKEDYFKKIECFDSVEISGVEDRFNASLGTYHDLLKIIKDKDFLDNEENEDILEDIVLTLTLFEDREMIEERLKTYAHLFDDKVMKQLKRRRYTGWGRLSRKLINGIRDKQSGKTILDFLKSDGFANRNFMQLIHDDSLTFKEDIQKAQVSGQGDSLHEHIANLAGSPAIKKGILQTVKVVDELVKVMGRHKPENIVIEMARENQTTQKGQKNSRERMKRIEEGIKELGSDILKEYPVENTQLQNEKLYLYYLQNGRDMYVDQELDINRLSDYDVDAIVPQSFLKDDSIDNKVLTRSDKNRGKSDNVPSEEVVKKMKNYWRQLLNAKLITQRKFDNLTKAERGGLSELDKVGFIKRQLVETRQITKHVAQILDSRMNTKYDENDKLIREVRVITLKSKLVSDFRKDFQFYKVREINNYHHAHDAYLNAVVGTALIKKYPKLESEFVYGDYKVYDVRKMIAKSEQEIGKATAKYFFYSNIMNFFKTEITLANGEIRKRPLIETNGETGEIVWDKGRDFATVRKVLSMPQVNIVKKTEVQTGGFSKESILPKRNSDKLIARKKDWDPKKYGGFDSPTVAYSVLVVAKVEKGKSKKLKSVKELLGITIMERSSFEKDPIDFLEAKGYKEVRKDLIIKLPKYSLFELENGRKRMLASAGELQKGNELALPSKYVNFLYLASHYEKLKGSPEDNEQKQLFVEQHKHYLDEIIEQISEFSKRVILADANLDKVLSAYNKHRDKPIREQAENIIHLFTLTNLGAPAAFKYFDTTIDRKRYTSTKEVLDATLIHQSITGLYETRIDLSQLGGD

SEQ ID NO: 264 - protein, 1368 aa, Artificial Sequence
  Synthetic Sequence
MDKKYSIGLAIGTNSVGWAVITDDYKVPSKKLKGLGNTDRHGIKKNLIGALLFDSGETAEATRLKRTARRRYTRRKNRICYLQEIFSNEMAKVDDSFFHRLEESFLVEEDKKHERHPIFGNIVDEVAYHEKYPTIYHLRKKLADSTDKVDLRLIYLALAHMIKFRGHFLIEGDLNPDNSDVDKLFIQLVQTYNQLFEENPINASRVDAKAILSARLSKSRRLENLIAQLPGEKKNGLFGNLIALSLGLTPNFKSNFDLAEDAKLQLSKDTYDDDLDNLLAQIGDQYADLFLAAKNLSDATLLSDILRVNSEITKAPLSASMIKRYDEHHQDLTLLKALVRQQLPEKYKEIFFDQSKNGYAGYIDGGASQEEFYKFIKPILEKMDGTEELLAKLNREDLLRKQRTFDNGSIPYQIHLGELHAILRRQEDFYPFLKDNREKIEKILTFRIPYYVGPLARGNSRFAWMTRKSEETITPWNFEEVVDKGASAQSFIERMTNFDKNLPNEKVLPKHSLLYEYFTVYNELTKVKYVTEGMRKPAFLSGEQKKAIVDLLFKTNRKVTVKQLKEDYFKKIECFDSVEISGVEDRFNASLGTYHDLLKIIKDKDFLDNEENEDILEDIVLTLTLFEDREMIEERLKTYAHLFDDKVMKQLKRRRYTGWGRLSRKLINGIRDKQSGKTILDFLKSDGFANRNFMQLIHDDSLTFKEDIQKAQVSGQGDSLHEHIANLAGSPAIKKGILQTVKVVDELVKVMGRHKPENIVIEMARENQTTQKGQKNSRERMKRIEEGIKELGSDILKEYPVENTQLQNEKLYLYYLQNGRDMYVDQELDINRLSDYDVDAIVPQSFLKDDSIDNKVLTRSDKNRGKSDNVPSEEVVKKMKNYWRQLLNAKLITQRKFDNLTKAERGGLSELDKVGFIKRQLVETRQITKHVAQILDSRMNTKYDENDKLIREVRVITLKSKLVSDFRKDFQFYKVREINNYHHAHDAYLNAVVGTALIKKYPKLESEFVYGDYKVYDVRKMIAKSEQEIGKATAKYFFYSNIMNFFKTEITLANGEIRKRPLIETNGETGEIVWDKGRDFATVRKVLSMPQVNIVKKTEVQTGGFSKESILPKRNSDKLIARKKDWDPKKYGGFDSPTVAYSVLVVAKVEKGKSKKLKSVKELLGITIMERSSFEKDPIDFLEAKGYKEVRKDLIIKLPKYSLFELENGRKRMLASAGELQKGNELALPSKYVNFLYLASHYEKLKGSPEDNEQKQLFVEQHKHYLDEIIEQISEFSKRVILADANLDKVLSAYNKHRDKPIREQAENIIHLFTLTNLGAPAAFKYFDTTIDRKRYTSTKEVLDATLIHQSITGLYETRIDLSQLGGD

SEQ ID NO: 265 - protein, 240 aa, Acetobacter aceti
MANIAENLVFGIDLGIGSCGWAVLNQKAKDENIVALGSWCFDVPETDKERIPTNQIRRANRLLRRVIRRRRNRMAEIRRLFASKGMLDTADPDALAKISADPWEMRAKGLDYQLTPQEFAVALGHIAKRRGFKSAAKRVSTNAPSEDSKMLAALEKTKEQSAQYRTIGEMFARDPAYADRRRNRDGCFDRTMSREDLFKETQILFESQRRLGNFSATSETEQAFIDIAFRQKPMQDSERL

SEQ ID NO: 266 - protein, 400 aa, Acetobacter aceti
SFERFRLLCRLVNLRVTDGLEDRPLTPEELRLACEDAGKTRKLSVKKVRSLIGLRDDQRFTTIPPDQEQHDIAARTGDALTGTATFRAILGESFWRQLLPHPEQLDRAAWIISFHELTDTIISKLATIGLPSEVMELIRKALEDGKFSKFKGAASLSDKAARKLIPFLQEGLTYDKACQKAGYNHAASKFTHYDSIDTKAKFNSLMDDVRDSITNPVARKAISEGMKQVWAMRNQWGLPGAICIELARDVGNSAEKRREIESGIKKNTAQRERERQEAKEHLNQSDISSETLLRYRLWKEQGGRCCYTDQPITPSQLIASDNSVQVDHILPWSRFGDDSYLNKALCTAKANQEKKNRTPWEWIHNQKGVEAWNHFTAAVESRKETRGLKKRNFLLKSSKE

SEQ ID NO: 267 - protein, 376 aa, Acetobacter aceti
YAARVMAEAVRLLYPSGNRAEKGGVKRVFTRPGALTAALRHAWGVESLKKINGKRLNDDRHHALDAAVVAAVSEKEIQKLTKSFQICEQKGLARPMRDVPMPWEGFRHQLETAYADIRVARPERRRARGKGHDATIRQLREEKDGPVVYERRAISDLKLTDLERIKDPERNSAIISSLRTWIEKGKPADYPPQSPKGDEIRKIRVMSRNKPAVSVRGGTADRGEMTRVDVFTKMGKKGKPEWFLVPIYRHQVIDRIQWPQPPNQAAANGKSEKNWPTMGLEHEFRFSLYPRSYVQIVKRDGEIIEGYFAGLDRTVAAFSLLSSSDPTSIQRGIGAKTLESIRKYNVNRFGDISMVEQETRTWHGDVCISPDQPDSA

SEQ ID NO: 268 - protein, 1054 aa, Actinobacillus suis
MKLTPLNYILGLDLGIASVGWAVVEIDEQENPLGLIDVGVRTFDRAEVPKTGESLALARRLARSARRLVKRRADRIKKAKRLLKAENILLSADEHLPNDVWQLRVKGLDQKLERQEWAAVLLHLLKHRGYLSQRKNESKSENKELGALLSGVETNHQILQSAEYRTPAEIAVKKFHVEDGHIRNQRGAYTHTFSRLDLLAEMELLFQRQTDLGNPHTSAKLLENLTALLMWQKPALAGEAILKMLGKCTFEPTEYKAAKNSYSAERFVWLTKLNNLRILEQGAERALTDNERFALLDQPYEKAKFTYAQARTMLALPDEAIFKGVRYQGEDKKAVETKTILMEMKAYHQIRKALENADLKAEWNELKNNSELLDDIGTAFSLHKTDEDICRYLDGKLSESILNALLENLNFDKFIQLSLKALQQILPLMLQGQRYDEAVSAIYGDHYGKKSAEINRLLPTIPADEIRNPVVLRTLTQARKVINAVVRLYGSPARIHIETGREVGKSYQDRKKLEKQQEDNRKQRESAVKKFKEYFPNFVGEPKGKDILKMRLYELQQAKCLYSGKSLELHRLLEKGYVEVDHALPFSRTWDDSFNNKVLVLANENQNKGNLTPYEWLDGKNNSEHWQNFVARVQTSGFSHTKKQRILSHKLDEKGFIERNLNDTRYVARFLCNFIADNMLLTGKGKRKVFASNGQITALLRGRWGLQKVRDDNDRHHALDAVVVACSTVVMQQKITRFVRYEEGNVFSGERIDRETGEIIPLHFPSPWAFFRENVEIRIFSENPKLELENRLPDYPQYNHEFVQPLFVSRMPTRKMTGQGHMETVKSAKRLDEGLSVLKVPLTQLKLSDLERMVNREREVTLYESLKARLEQFGNDPAKAFAEPFHKKGGAVVKAVRVEQTQKSGVLVRDGNGVADNASMVRVDVFTKGGKYFLVPIYTWQVAKGILPNKAVTANVDEIDWLEMDESYQFIFTMYPNDLVKVKLKKEEFFGYYGGLDRATGAIVIKEHDLEKSKGKQGIYRIGVKLALSFEKYQVDELGKNIRPCRPTKRQHVR

SEQ ID NO: 269 - protein, 239 aa, Actinobacillus ureae
MEIRIFSENPKLGLENRLPGYPQYNHEFVQPLFVSRMPTRKMTGKGHMETVKSAKRLDEGLSVLKVPLTQLKLSDLERMVNREREDALYQSLKAHLEQFGNDPAKAFAEPFHKKGGTVVKAVRVEQTQKSGVLVRDGNGVADNTSMVRVDVFTKAGKYFLVPIYKWQVAKRILPNKAVTAGVDEIDWLEMDSSYQFIFTMYANDLVKVKLKKRSILGLLRWFRSCNWGYCYQRTRFREI

SEQ ID NO: 270 - protein, 400 aa, Actinobacillus ureae
MKLTPLNYILGLDLGIASVGWAVVEIDEQENPLGLIDVGVRTFDRAEVAKTGESLALARRLARSSRRLVKRRADRIKKAKRLLKAENLLLSADEILPNDVWQLRVKGLDQKLERQEWAAVLLHILKHRGYLSQRKNESKSENKELGALLSGVATNHQLLQTAEYRTPAEITVKKFQAEENGHGHIRNQRGDYSHTFDRKDLLAEMKLLFQRQAELGNPHTSEKLLENLTTLLLWQKPALAGEAILKMLGKCTFEPAEYKAAKNSYSAERFVWLTKLNNLRILENGIERALTDNERFTLLDQPYEKAKLTYAQARTMLALSDEAIFKGVRYQGEDKKAAEKVALIEMKGYQHIRKALEGAGLKAEWNELKNNSELLDDIGTAFSLYFSISNLPTEIAYFTP

SEQ ID NO: 271 - protein, 1113 aa, Actinomyces georgiae
MSASSQNVERIRYKVGIDVGLRSIGFCAVQVDADDRPVKLLNTVVHVHDAGVSPADAKKADTRKLVSGVARRTRRLYRTRKRRLVDLDRQLDGLGWPLVDPARFADPREPWFAREKLVSGRVDDADERKELLSVALRHIAHHRGWRNPYSTVESLQADAPPSEFLQGLNQRVSEKLGTELDPGLTQGQLVAKLLHRFPNAKIRGPEGILRGKLHQSDNAGELRLICRTQGLDCHITEELVRLVFQAKSPKANKEMRKRIGRDQLPGQGAHIRAEKAHPVFQRFRIVAVLANLRIREAHVDRRLTAEEMRTLTDFLLGLAGSEQPTWEELADNLNIERHQLRGTAKASVDGAPALRFPPIDATTDRIYASKLKWLAEWWRQADEERRGYMVDALSNSGGSEDEPYLDDEIAEMLEQASEEDQAKLDSLHLPGGRASYCLDTLRRLTDAMLGGGLDLFEARKAVFHVDDDWAPPTDPIGAPVGNPPVDRVLKHVARWLEAATGRWGAPQTINIEHVREGLGSEKAARELTRMNDRRRRNNQKLVEEMGEKLGMSGRIRRSDRMRYEAIRRQNCECLYCGQPITYQTMEMDHIVPRAGAASTNSRSNLAAVCRRCNHQKGKLPFAVWAESQDSPAEVRLQDAVQRVRHWLRDAGMGQKELQALRVQVIARLKSKRPDEEFDGRSMESIAWMANELRARVEAQYRGSGTTVRVYRGALTAEARKASGFEGRVNLIGGRGKDRFDRRHHAMDALVIALMNQSVAQTLALRLNMRDSQWLTQSEQTWRQFHGAPGEAARKWEAWDRDMRDASDLFNLALDGGRIPITENVRLRVGNGRVHEDGVIRFKPEYEVKGKTIKGGEARLLGDSLPSEQIDRAETPALWTALTRLPEYDRKSGLPENPDRVIRVNGAVVQATDRIRFFGTPASVAVRGGYAKLGESIHHARIYRINGKTPKYAMIRVYTIDLMRLNHEDIFTAVLKPSTISMRCAEKKLKYAIAEGNAEQIGWLVEGDQLELDAAAYAKGVGADLMREYPMATCWRVAGFPDEAKLRLRPVLLAAEGMGEDAPKFMREVLENQGWRPAVNALLSPGSVRVVRRNVLGEPRFKSSGHLPTTVDLV

SEQ ID NO: 272 - protein, 1101 aa, Actinomyces naeslundii
MWYASLMSAHHLRVGIDVGTHSVGLATLRVDDHGTPIELLSALSHIHDSGVGKEGKKDHDTRKKLSGIARRARRLLHHRRTQLQQLDEVLRDLGFPIPTPGEFLDLNEQTDPYRVWRVRARLVEEKLPEELRGPAISMAVRHIARHRGWRNPYSKVESLLSPAEESPFMKALRERILATTGEVLDDGITPGQAMAQVALTHNISMRGPEGILGKLHQSDNANEIRKICARQGVSPDVCKQLLRAVFKADSPRGSAVSRVAPDPLPGQGSFRRAPKCDPEFQRFRIISIVANLRISETKGENRPLTADERRHVVTFLTEDSQADLTWVDVAEKLGVHRRDLRGTAVHTDDGERSAARPPIDATDRIMRQTKISSLKTWWEEADSEQRGAMIRYLYEDPTDSECAEIIAELPEEDQAKLDSLHLPAGRAAYSRESLTALSDHMLATTDDLHEARKRLFGVDDSWAPPAEAINAPVGNPSVDRTLKIVGRYLSAVESMWGTPEVIHVEHVRDGFTSERMADERDKANRRRYNDNQEAMKKIQRDYGKEGYISRGDIVRLDALELQGCACLYCGTTIGYHTCQLDHIVPQAGPGSNNRRGNLVAVCERCNRSKSNTPFAVWAQKCGIPHVGVKEAIGRVRGWRKQTPNTSSEDLTRLKKEVIARLRRTQEDPEIDERSMESVAWMANELHHRIAAAYPETTVMVYRGSITAAARKAAGIDSRINLIGEKGRKDRIDRRHHAVDASVVALMEASVAKTLAERSSLRGEQRLTGKEQTWKQYTGSTVGAREHFEMWRGHMLHLTELFNERLAEDKVYVTQNIRLRLSDGNAHTVNPSKLVSHRLGDGLTVQQIDRACTPALWCALTREKDFDEKNGLPAREDRAIRVHGHEIKSSDYIQVFSKRKKTDSDRDETPFGAIAVRGGFVEIGPSIHHARIYRVEGKKPVYAMLRVFTHDLLSQRHGDLFSAVIPPQSISMRCAEPKLRKAITTGNATYLGWVVVGDELEINVDSFTKYAIGRFLEDFPNTTRWRICGYDTNSKLTLKPIVLAAEGLENPSSAVNEIVELKGWRVAINVLTKVHPTVVRRDALGRPRYSSRSNLPTSWTIE

SEQ ID NO: 273 - protein, 1181 aa, Actinomyces sp.
MLHCIAVIRVPPSEEPGFFETHADSCALCHHGCMTYAANDKAIRYRVGIDVGLRSIGFCAVEVDDEDHPIRILNSVVHVHDAGTGGPGETESLRKRSGVAARARRRGRAEKQRLKKLDVLLEELGWGVSSNELLDSHAPWHIRKRLVSEYIEDETERRQCLSVAMAHIARHRGWRNSFSKVDTLLLEQAPSDRMQGLKERVEDRTGLQFSEEVTQGELVATLLEHDGDVTIRGFVRKGGKATKVHGVLEGKYMQSDLVAELRQICRTQRVSETTFEKLVLSIFHSKEPAPSAARQRERVGLDELQLALDPAAKQPRAERAHPAFQKFKVVATLANMRIREQSAGERSLTSEELNRVARYLLNHTESESPTWDDVARKLEVPRHRLRGSSRASLETGGGLTYPPVDDTTVRVMSAEVDWLADWWDCANDESRGHMIDAISNGCGSEPDDVEDEEVNELISSATAEDMLKLELLAKKLPSGRVAYSLKTLREVTAAILETGDDLSQAITRLYGVDPGWVPTPAPIEAPVGNPSVDRVLKQVARWLKFASKRWGVPQTVNIEHTREGLKSASLLEEERERWERFEARREIRQKEMYKRLGISGPFRRSDQVRYEILDLQDCACLYCGNEINFQTFEVDHIIPRVDASSDSRRTNLAAVCHSCNSAKGGLAFGQWVKRGDCPSGVSLENAIKRVRSWSKDRLGLTEKAMGKRKSEVISRLKTEMPYEEFDGRSMESVAWMAIELKKRIEGYFNSDRPEGCAAVQVNAYSGRLTACARRAAHVDKRVRLIRLKGDDGHHKNRFDRRNHAMDALVIALMTPAIARTIAVREDRREAQQLTRAFESWKNFLGSEERMQDRWESWIGDVEYACDRLNELIDADKIPVTENLRLRNSGKLHADQPESLKKARRGSKRPRPQRYVLGDALPADVINRVTDPGLWTALVRAPGFDSQLGLPADLNRGLKLRGKRISADFPIDYFPTDSPALAVQGGYVGLEFHHARLYRIIGPKEKVKYALLRVCAIDLCGIDCDDLFEVELKPSSISMRTADAKLKEAMGNGSAKQIGWLVLGDEIQIDPTKFPKQSIGKFLKECGPVSSWRVSALDTPSKITLKPRLLSNEPLLKTSRVGGHESDLVVAECVEKIMKKTGWVVEINALCQSGLIRVIRRNALGEVRTSPKSGLPISLNLR

SEQ ID NO: 274 - protein, 1120 aa, Actinomyces sp.
MNAMKQYNAGIDVGINSVGFAAIEVDSKGLPLNILNNMVVLHDSGVDPGTAKTGATRLANSGTARRTRKLIARRRKRLQKLDRYIEVQGWPLVDFSSLPDPYTPWKIRAKLTQDRLEGEEQGRGLSIALRHMARHRGWRNPYEGVESLHSPKEASKQFKDLKDRVTKVSGVIFDEDATPAEVVCDIGLSPKQRLRSAPSAKYKEGATLADEPVGGKSKEGLLGGKLMQSDNANELRKIGIVQGLSNEKVNEIIDQVFASESPKGQAGKRAKKDELPGQEQYVRALRAHLAFQRFRIVAAVANLRILEAEPKHERLLSQSEKDKVIEFLMSADGDDGVTWSDVAEELGIERECLSGTAKRGADGERPSSFPPTNSTNISIVRSKVKPLIEWWRKASDDEQATLVTALSNADELTDDQPSAETVRQFLSSPDEQSQEKIDKISLPKGRAAYSVNSLERLTRRMLKDSVDLFEARKREFGVDNNWTPTPDSIGEPVGNPAVDRVLKIVNRWLLAVTRKWGPPKVVNIEHVRVGFTSAAQTRKYEEENKTNRERNLAILEELRDKFGTSGKIRREDITRFAALRRQNCQCAYCGEAITFFDCEMDHIVPRKGPGSTNTRNNLVAICERCNKSKSNMPFSLWAQNCDIPGVSVEAVIDRVRTWIKDPELNPKQYNNFKKDVIERLRKTVDDDAIDNRSIESVAWMATELADRIGSHFRTAGANTKVRVYRGWLTSEARKASGFEGKINLIGGRGKTRLDRRHHAMDAATIALMRQSVAQTLVERASIRESDRLRRVVSSSWKDYRGADRDKQFSYGSWLNSMNALAELFNRAIDADGIPVTQNLRLRLGNGEAHDATIRSLEKKRVGASWTIGEIDRASTPQLWLALTRQEDFDQNDGLPANASRELRVKNHWFHAEENVTLFPTKSAAIAVRGGYAEIGNTIHHARLYKLPGKKLTYGMIRVFAIDLLCAWHTDLFSSPLLPESISLRTAETKVRRAVEDGAAMYIGWLVDGDEIVLDPETKAFKSNKIGEYLCEFPGTKRWKVDGFPDKEKLRLRPLQLAGEGLPEDVSAGTEEILGPKGNGWRVAINALFKSSQLVVVRRTALGMVRKLSRRHLPLTTRLRG

SEQ ID NO: 275 - protein, 1095 aa, Actinomyces sp.
MPAHHLRVGIDVGTHSVGLATLRVDDQGTPIELLSALSHIHDSGIGKEGQKDHDTRKKLSGVARRTRHLLRNRRERLQQLDKVLVDLGFPIPKPEEYPDLSERTDPYRVWRVRARLVEETLPEELRGPAISMAVRHIARHRGWRNPYSKVESLLSPAEESSFMKALRKRIMTKTGEVLDDDITPGQAMAQVALTHKIYMRGPEGILGKLHQSDNANEIRKICARQGISSDVCKQLLRAVFKAESPRGSAVSRVAPDPLPGQGSFRRAPKCDPEFQRFRIISIVANLRISETKGENRPLTVDERRQVVAFLMEDSQADLTWVDVAEKLRVSRQALRGTAMLTADGERSAAQPPIDVTDQIMRKTKISALKTWWDKADAERRGAMVRYLYEGLEDSECAEVIAKLPEKDHAKLDSLHLPAGRAAYSRESLTALSDHMLETTNDLHEARKRLFGVDDSWAPPAEPVGAPVGNPSVDRTLKIVARYLSAVESIWGTPEVIHVEHVRDGFTSERTAEERDKANRSRHNDNQKAIEKIQHDYGKEGYISRGDIVRFHALKLQGSACLYCGTTIGYHTCQLDHIVPQAGPGSNNRRGNLVAVCERCNHSKSNTPFAVWAQKCGIPHVGVKEAISRVNGWVEHNHSTSSGDLTRLKKEVIARLRRTQKDPEIDERSMESVAWMANELHHRIAAAYPETTVMVYRGSITAAARKAASIESRINLIGEKGRKDRLDRRHHAVDASVVALMEPSVAKTLAERSSLRGEQRLTGQEQTWKQYTGLTVGARERFEAWRGHMHRLTELFNESLAADEVYVTQNIRLRLSDGSAHTVKASKLVSHRLGDGLTVQQIDRACTPALWCALTREIDFDEKNGLPAREDRVIRVHGQEISSADCIQVFSKRKKTKSDRDEAPFGAIAVRGGFVEIGSSIHHARIYRIEGEKPAYAMLRVFTHDLLSQRHGDLFSAVIPPQSISMRCAATELRQAISEGRATYLGWIVSGDELHIPVETFTTHKIGSFLKDYPNTTRWRICGYDSETMLILKPRILSAEGLNNSSDIAEYVIKNKGWRVAINKLAKVHPTVVRRDALGRPRHSSRSNLPVTWSIE

SEQ ID NO: 276 - protein, 1144 aa, Actinomyces sp.
MSMIDSSENVPGIRYRVGIDVGLKSIGFCAVEVDRNDQPVRMLNSMVFIHDAGVDPNENKAAKSRKLTAGVARRTRRLYRTRHQRLVNLDRVLSKEFGWPLPDLTSFKDPREPWHVRAGLLEGYIADDEKRKEALSIALRHIARHRGWRNPYAKVETLLQPSEPSDFLKGLNDRISEELGRAFPADATPGQLVDTYLAHPDYVGRAGTPKLRGPQGILAGKLHQSDNAQEIRGICDVQRIEPAERDRLIRVVFEAKSPKGSAKERGLVGYDELPGQGRHVRAEKAHPAFQLFRMVSVLANLRIREGREERPLTPDELEDLVDFINQVSLKQEVTWQDLADKLRIERADLRGTAKASFDGSPVLRNPPTDVTTEKIMACKVKWLKEWWKEADDEQRGYMVDAFSNSGGSEDGTDVNDEVAELLEQATEDDQLEFEKISLPQGRAAYSLDSLRRLTDRMLRDGVDLHTARRLEFNVGDDWKPAVEPIGAPTGNPAVDRVLKQVSRWLHAATERWGEPTVINIEHARDGLGSERVARELMRENEKRRKANASAVAEMAAKLKLSGKVHRSDQIRYFALQRQNCQCLYCGAPITYTTAEMDHIVPRADGSSTNDRSNLAAVCRTCNHMKGKIPFAVWASSDKANQGVSLTGALERVNMWQRDSGMSPRQLKQLQREVCARLKSKKPDQEFDGRSMESVAWMAVELRTRIEGFYRSRDEESVPSVGVYRGQLTAEARRASGFESRVNLIGGRGKTRFDRRHHAMDALVIALMNPSVSRTLALRLNMRDAQRLTGVEETWKHFYGKPGEASKRFESWRESMLRGVELFNIALSDNAIPFVENIRLRVGSSVIHDATVHSFCPPKTPDGKQIITKGYGEQHSLGSAMPVELIDRAETPALWTALTRCPDFDPKKGLPENPQRTISVNGTRVGPTELVNFFEFSKSGPKACLKVRGGYVDLSGAIHHARIYRIAGKKTAYAMIRVFQVDLLRLKDHDVFTTPLKPSTISMRTAEPKIREALANGTATQIGWLVEGDELVIDTSKYSGGFIGEVLARYPEATSWRVAGFMTPAKLRIKPILLSKEGFVDETQAALLGVEVTSEAIQKTVDRPGWLPAVNVLFGAGGVRVIRRNCLGEERYHSSASLPVSMTLE

SEQ ID NO: 277 - protein, 1103 aa, Actinomyces sp.
MTKINDDLRYRVGIDVGLKSIGFCAVEVDENDQPLRLLNSMVFVHDAGVDPNENKAAKSRKLTAGVARRTQRGTAQNRRRLAELDRALSEELNWPLPNLEDFEDSYEPWHTRAELVEHYIKDDAERAEALAIAIRHIARHRGWRNPYLSVDSLLTPQEPSKFLRGLNERVTQALGREFPADATPGQLICAYIDSPKYAETQGIRGDSGILSGKLHQFDNVGEIRKICEVQRLDHDVFKLLVRKVFFAKSPRGSAAGLVGHDQIPGQGKYIRAEKAHPDFQLFRIVAVLTNLRIREGKAERCLTPDELRGLVDYILEVQLKQQVTWADLADNLGIERTDLRGTARASFDGSPALRFPPTDVTAEKIMASKVKWLKDWWDKADSERRGFMVDALSNSGGSTGDNDIDDEVAALLEAATEDEQAELEKIQLPQGRAAYSLDSLRRLTKRMLEEGVDLHTARKEEFNVDDDWRPEPEPIEAPVGNPAVDRVLKQVARWLNMATDRWGVPDVINIEHTRDGLGSEKVARELLRESQKRQDLNQKDMDKMIRELGISGKARRSSLIKYQAIQRQNSMCLYCGTEIGFETAEMDHIVPRALSGSTNDRSNLAAVCRACNHQKGAVPFAVWATSGEAHAGVSLEDAIKRVRLWQKGPGMSPKQHKAFQNEVISRLKSRKPDEEFDGRSMESVAWMAVELRTRIDGYYRKVNSDSVPKVGIYRGQLTAEARKASGFENRVNLIGGKGKTRFDRRHHAMDALVIAMMNQSVSQTLALRVNMRESQRITGQEETWKNFYGKPGQASERFEKWREGMLRAVELFNIELAKNAIPFHENVRLRVGSSKVHDDTVRKFIHAKLGEALSVAMIDCAETPALWTALTRLPDFDPKDGLPEDLSREIYIHSRKITADEQLNFFNSPSACLKVRGGYVEIGSSIHHARVYRIDGKKTTYSMVRVFATDLVKMTHEDVFTTPLKPSTISMRTADPKIRKALADGTATQIGWLVEGDELQLETDKYSGGLIGEVLAEYPQLTSWRVAGFYGVTQLRLRPYMLAAEGIPSDASESLRKVIEGKGWLPAINALLSSGCVKVVRRNCLGEPRFNAKSSLPVSQLLR

SEQ ID NO: 278 - protein, 1114 aa, Actinomyces turicensis
MQFHFYMVYVTMKGMNDKDASQQLRYRVGIDVGTHSIGFCAVEVDESGMPIQLLNSMVHKHDSGIDPGGNDTATTRLAEAGVARRTRRLIRRRKKRLQELDAFIEECGWPLVDLATITDARSPWRIRAHLATEHIDDEAEQGKLLSIALRHMARHRGWRSPYARISSLHIQADPSEQLKALAQRVSEKTGISLTADQTPAQLISVYLDVFETGKLRGPEGILGGKLMQSDNANELRRIATVQGLDNDLLKKIIGFVFAAESPKGSAAKRVGKDVLPGAHGLRAEKAHPAFQQFRIVSIVQNLRIKEGTGLRALTSEETEIVVDFLNQAGLTEAPTWEEVADNLEIPRSHLKGTATEGFDGIAPSTRPPFDVTSQKILNGKLKKLSAWWKDADYDHRCAMVNALSNVGSDDEGSLADDDVREFLSDFTDEELEALDKVELPGGRAAYSVDSLEKLTNTMLSEGCDLHSARKIAFGVDDSWTPPAEPIGQPVGNPAVDRVLKQVARWISAATNQWGTPESVNIEHVRDALGSEKASREYQRSLQTRRIRNEKLFAEMRERLDIGGKPRRSELTRYLALQRQNCQCLYCGMPITYTDAEMDHIVPRKGAASTNTRENFAAVCRACNHQKSNLPFAVWAEKTERPGVSVKEAYKRVSDMRIEPGMNGRQMNEFRKAIRLRLTTKHADAEIDGRSLESVAWMANELRHRIEGFYRSAENDVTVRVFRGAVTAEGRRASGFESRVNLIGGKGKTRLDRRHHAMDALTIALMEPGIAQTIALRMNMRESQRVLGEQETWKSFTGGSDTARKRWEHWCEEMLRASELFNVFLAEDRIPICQNKRLRLGSSAVHKAIVQPFEASDKRIVSDAMPVELIDRASTPALWTALTRDPDFDPKEGLPANPSRTIRLHDKRLGPNETVEFFPTAAACLAIRGGYCEIGAGIHHARIFRISGKKTTYAMLRVYQCDLVRFQKENLLTVELPANTISVRTAVPKLREALAHGTAEQIGWLVVGDELKIDLSGFTTGQIETFNETYPQATRWEVTGFPTKTQLRLKPLLIASEGLADDVPDDIVKIVKGPGWWPAIDKLLKIGNVVLYRRDTHGKPRVVSHRSLPLSSKLQ

SEQ ID NO: 279 - protein, 1113 aa, Alcanivorax sp.
MRYRVGLDLGTASVGAAVFSMDEQGNPMELIWHYERLFSEPLVPDMGQLKPKKAARRLARQQRRQIDRRASRLRRIAIVSRRLGIAPGRNDSGVHGNDVPTLRAMAVNERIELGQLRAVLLRMGKKRGYGGTFKAVRKVGEAGEVASGASRLEEEMVALASVQNKDSVTVGEYLAARVEHGLPSKLKVAANNEYYAPEYALFRQYLGLPAIKGRPDCLPNMYALRHQIEHEFERIWATQSQFHDVMKDHGVKEEIRNAIFFQRPLKSPADKVGRCSLQTNLPRAPRAQIAAQNFRIEKQMADLRWGMGRRAEMLNDHQKAVIRELLNQQKELSFRKIYKELERAGCPGPEGKGLNMDRAALGGRDDLSGNTTLAAWRKLGLEDRWQELDEVTQIQVINFLADLGSPEQLDTDDWSCRFMGKNGRPRNFSDEFVAFMNELRMTDGFDRLSKMGFEGGRSSYSIKALKALTEWMIAPHWRETPETHRVDEEAAIRECYPESLATPAQGGRQSKLEPPPLTGNEVVDVALRQVRHTINMMIDDLGSVPAQIVVEMAREMKGGVTRRNDIEKQNKRFASERKKAAQSIEENGKTPTPARILRYQLWIEQGHQCPYCESNISLEQALSGAYTNFEHILPRTLTQIGRKRSELVLAHRECNDEKGNRTPYQAFGHDDRRWRIVEQRANALPKKSSRKTRLLLLKDFEGEALTDESIDEFADRQLHESSWLAKVTTQWLSSLGSDVYVSRGSLTAELRRRWGLDTVIPQVRFESGMPVVDEEGAEITPEEFEKFRLQWEGHRVTREMRTDRRPDKRIDHRHHLVDAIVTALTSRSLYQQYAKAWKVADEKQRHGRVDVKVELPMPILTIRDIALEAVRSVRISHKPDRYPDGRFFEATAYGIAQRLDERSGEKVDWLVSRKSLTDLAPEKKSIDVDKVRANISRIVGEAIRLHISNIFEKRVSKGMTPQQALREPIEFQGNILRKVRCFYSKADDCVRIEHSSRRGHHYKMLLNDGFAYMEVPCKEGILYGVPNLVRPSEAVGIKRAPESGDFIRFYKGDTVKNIKTGRVYTIKQILGDGGGKLILTPVTETKPADLLSAKWGRLKVGGRNIHLLRLCAE

SEQ ID NO: 280 - protein, 1146 aa, Alicyclobacillus hesperidum
MAYRLGLDIGITSVGWAVVALEKDESGLKPVRIQDLGVRIFDKAEDSKTGASLALPRREARSARRRTRRRRHRLWRVKRLLEQHGILSMEQIEALYAQRTSSPDVYALRVAGLDRCLIAEEIARVLIHIAHRRGFQSNRKSEIKDSDAGKLLKAVQENENLMQSKGYRTVAEMLVSEATKTDAEGKLVHGKKHGYVSNVRNKAGEYRHTVSRQAIVDEVRKIFAAQRALGNDVMSEELEDSYLKILCSQRNFDDGPGGDSPYGHGSVSPDGVRQSIYERMVGSCTFETGEKRAPRSSYSFERFQLLTKVVNLRIYRQQEDGGRYPCELTQTERARVIDCAYEQTKITYGKLRKLLDMKDTESFAGLTYGLNRSRNKTEDTVFVEMKFYHEVRKALQRAGVFIQDLSIETLDQIGWILSVWKSDDNRRKKLSTLGLSDNVIEELLPLNGSKFGHLSLKAIRKILPFLEDGYSYDVACELAGYQFQGKTEYVKQRLLPPLGEGEVTNPVVRRALSQAIKVVNAVIRKHGSPESIHIELARELSKNLDERRKIEKAQKENQKNNEQIKDEIREILGSAHVTGRDIVKYKLFKQQQEFCMYSGEKLDVTRLFEPGYAEVDHIIPYGISFDDSYDNKVLVKTEQNRQKGNRTPLEYLRDKPEQKAKFIALVESIPLSQKKKNHLLMDKRAIDLEQEGFRERNLSDTRYITRALMNHIQAWLLFDETASTRSKRVVCVNGAVTAYMRARWGLTKDRDAGDKHHAADAVVVACIGDSLIQRVTKYDKFKRNALADRNRYVQQVSKSEGITQYVDKETGEVFTWESFDERKFLPNEPLEPWPFFRDELLARLSDDPSKNIRAIGLLTYSETEQIDPIFVSRMPTRKVTGAAHKETIRSPRIVKVDDNKGTEIQVVVSKVALTELKLTKDGEIKDYFRPEDDPRLYNTLRERLVQFGGDAKAAFKEPVYKISKDGSVRTPVRKVKIQEKLTLGVPVHGGRGIAENGGMVRIDVFAKGGKYYFVPIYVADVLKRELPNRLATAHKPYSEWRVVDDSYQFKFSLYPNDAVMIKPSREVDITYKDRKEPVGCRIMYFVSANIASASISLRTHDNSGELEGLGIQGLEVFEKYVVGPLGDTHPVYKERRMPFRVERKMN

SEQ ID NO: 281 - protein, 1552 aa, Anaerophaga sp.
MFSQRNNPYCELLQNVKQLYKEKFGKTNQVDNSIIYGFMKRILGLDLGTNSIGWALVENDENDRKGKIIGMGSRIIPMDMSELDNFNKGASISKTAERTRLRMTRRLRERHLLRRARLHRILNIMGFLPEHYRNSIDFIDKKGCFFEGQEPKIAYKPDKNSEQFCFLFTSSFHEMLEDFRKFQPELIQNRKKVPYDWTIYYLRKKALTQKISKEELAWIILNFNTKRGYYHLRGEDEDNQDNKKIKEFRALKVVNVTEREGANSSGKKWYDMELENGWVYSRQSNLPPNLEGKTIELIVSYTLDNNGNIKKDKNGKEKYSLSMPGEEDWNLVKIKTENDLKTSKKSVGEYIYDHLLKNPDQKIRGKLISTIERKFYKEELSRILKTQMNFYEELKNRELYQKCVEELYPNNKSHQQTLLQKDFIHLIVEDIIFYQRPLKSKRAFVNNCPLEYRVYVDKKSGELIKSGVKCIPKSHPLFQEFRLWQYVRNLRIYERERMVNGRLMVNVDVTNELLPDEEHIVRLFDLLNDRKSFKQDDVLRFVGIKSPKDRKRYSWNYPEDKELPGNETRHLILAWLKKVDGVPEDWLDPEKLKALWHLLYSVTDREEIIKGLHSFAKKYELPDTFVEHFKKIPRLEREYGSFSEKAIKKLLPLMRMGKYWKAEEIPADLLEKAQKIIDAEADDRISDEVREKLLHLKDISQLKGLPLWQASYLVYGRHSETGEVVKWRTSEDLEKYILQFKQHSLRNPVVEQVILEALRVVKDIWEHYGEGKEGFFNEIHVEIGRELKNPADKRKKITSQIQENENTNLRIKALLEELFNDPSVKNVRPYSPAQQEILRIYEDGVLNGQKEIPDDILKISKMARPSKSQLVKYKLWLEQKYRSPYTGEIIPLSQLFTSAYEIEHIIPQARYFDDSFSNKVICEAEVNREKGHQLAFEFITKRGGDEIELNFGKKVTILNVEEYQKFVKDHYGRSLRSLSKMRKLLMEDIPDDFIDRQLNDSRYISKVVRNLLSNIVRAEDENSLVSKHLITCTGGVTTRLKHEWGLNDVWNELITPRFVRLNKMGKEKFGEWINKKGKQVFQIQMPLELQKGFNKKRIDHRHHALDALVVACASRSHVNYLNNDSARANASETRYDLRNKLCYKDKTDSNGNYRWKFYKPWESFTEEAKNRLAGTVVSFKSNRRIMTRSSNRYFKWVDTSEGKKKKLVRQIKGDNQAIRKPLHKDTVLGKVSLRKEKKVSLSKAIDLWESIVDKPLKKRIQSLREQGYDKKLLLKYFKDRNNQFNGQDISRVNIYFFDNNLAARRVTLDASFNSEKRIDGITDSGIKKILYAHLQNEKYHGKKDEKGNEISPYELAFSPEGLEEMNANIKKLNGGKPHCPIYKVRLAETIGEKFKLGEKGNKNKKYVEAAKGTNLFFAVYVDEKGVRSFETIPFSVALERRKQKLAVVPEENENKEKLLFYLSPNDLVYVPDEDEKLIDYRQLSINPTRIYKMVSSSGTQCFFIPHFVASPIVQTMELGPNNKSERAWDGQMIKNVCYKLSVDRLGNVKIEK

SEQ ID NO: 282 - protein, 1515 aa, Anaerophaga thermohalophila
MKRILGLDLGTNSIGWALVESDEEQKSGKIQGIGSRIIPMDQNELDNFNKGNTVSQTAERTRLRMVRRLRERHLLRRERLHRVLKEIGFLPEHYLEQIDFTEKPGGFLPGKEPKIAYKPDNFKDKYDFLFQDSYHEMLSDFQDKNPEFIQKRKKVPQDWTIYYLRKKALTAKITKEELAWIILNFNQKRGYYQLRGEDEDVAKNTKKEEFHALKVVKVKEREDSEGASGKWYDIELENGWVYPRQSNIRPDWEGKILELIVTYNLDKDGNIKTDKEGNEKRSFRMPNKDDWTLRKKRTENEIEKSGKTVGEYIYDNLLDAPDLKIRGKLVSTIERKYYRSELEQILTAQKKYHPELSNSELFNKCISNLYPNNDIHRKALLSKDFVHLIINDIIFYQRPLKSKRSTVSNCPLEYRVYVDKVTGEKKKVPLKCIPKSHPLYQEFRLWQYVKNLRLFEKERFENGRLLTNVDVTEQFLPDEDKYVELFEFLNGRKTFKQDDILKFAGIKSAKDRVKYYWNYPQEKEYPGNETRYLIESRLKKIENVPDEWLNYEKIEELWHLLYSVTDKVEIEKGLQSFAAKYQLPDLFVEVFKGFPRMEREYGAFSKKAIKKLLPLMRMGKYWKLENINPDLIEKVQKIIDGEADDNINDGIRERFSEINEMSDLRGMPLWKASYLVYGRHSEAAEVIRWRTSADLDQYIKDFKQHALRNPIVEQVVLEALRVVKDVWNYFGEGREKFFDEIHVEIGRDLKNPADKRQKIANQIQENENTNLRIKALLVELFNDPEVQNVRPYSPVQQQLLKIYEDGVLNAERDIPDDIQKISRMANPTRNQLIRYKLWLEQKYRSPYTGEIIPLNKLFTSEYEVEHIIPRARYFDDSFSNKIISEAEVNRKKDRMLAFEFIKKLGGSTIDLNYGKKVSVLTVEEYQQFVKDHYGINPHSRLKMQKLLMDEIPESFIERQLNDSRYISKMVRNLLSNIVREENENSPVAKQLITCSGSITNTLKQEWGLNDVWNTIITPRFERLNKMGEQKYGEWVNKEGKPVFQIQMPLELQKGFNKKRIDHRHHALDALIVASATRSHVNYLSNEAAKTNAKDTRFDLRNRLCYKEKRGQNRNFTWRFYKPWNTFTEDAKNALNDIVVSFKSNHRVINKSTNRYFKWENLPGGMKKKRLVRQEKGDNWAIRQSLHKDTVLGKVSLRKVKPVSLSVALDSWNNIVDKALKKKIRSLKDQGYDKKLMLKYFKDRRNEYNGENISRVNVYYFDEEMAARRVDLDTSFNSEKRIEGITDSGIKKIIYAHLKNEKYHGQKDDKGKDISPYELAFSPEGIAEMNANIKQLNGGKPHCPIYKVRLAEPVGEKFQLGETGNKTEKLVEVAKGTNLFFGVYANDEGVRSFATVPFYLAVEREKQGLPAVPQENENGDQLLFWLSPNDLVYVPSEEDAHFANPKQIELDNSRIYKMVSSTGTQCFFIPHFVATPIVQTIELGPNNKSERAWDGQMIKKVCYKLSVDRLGNVEIE

SEQ ID NO: 283 - protein, 333 aa, Bacillus cereus
MMNPNNFTKEDFWRTIILYGLNQATYKIALGQSLIRFSEQQRNVVSMNELAEDFFDMYLERLKNGKPQLATPNRQTAMERIINSYNIGRLTRSQAIEKVEREAFNDVIDRFHTVDSLQVPMKFYEKTDKGIVIFDNVFEIFSDNNNFELRNELDARWDLLESAFEIKRTDSQLVNDIRKLYLANGYERTDITKNRSVLNGYQSNVCFYCGELMSDDDVHVDHVIPRQLINHDDIWNLVLSHGFCNQQKSDNLPDVNYIEKLIERNEYFIKSNHPISNKLKERLGNTPRRRRTTIDRIYEHAKLVLAPWKGIYGYNPATDPFYKTFIRNIVLSK

SEQ ID NO: 284 - protein, 1068 aa, Bacillus cereus
MRYVLGLDIGIASCGWAVINQEKERIEDLGVRIFDKAENPKDGKSLAAPRRDARSTRRTLRRKKHRMQRIKILLVKQGLLFKTELNHLYESATEFDVWNLRLDALERKLHPKEFARVLIHLAKRRGFKSNRKETTLSENGQILESISENQQIMEQQNYRTVGEMILKDKKFENHKRNKDGTYIGTVTRQQLQDEIQMIFHTQRLYKNDYATEEFESSYLEIWASQRPYASKDQIEKMIGYCTLEPKEKRTPKASWSFQYFVALQTINNLRLISKDKIEELSFEEKKQIMNLALEKPIVKYIDIRKLLSIPNDFQFNSLSYSADTVDTTLENKRCIELKEYHSINKVYKQVYGKNTPNLLPIDYDTIAYGLTIFKDDKDILEYLQNKYVNAKGKPIKNLAKKTYDDTFIQALLNLNFTKMGHLSFKALKNIIPFLEEGLSYDKACEKAGYNFKGTSYTERTKYLPVIPQNTNPVVHRALSQTRKVINAIIKKYGSPNAIHIETARELSKTFQERKEIDSRYQDNSKKNEHAIHKLKELGNINPSGINIVKFKLWSEQDGRCMYSGKYIEPHRLFEEGYTEVDHILPYSRSLDDSYNNKILTLGTENQRKGNKTPYEYMGNTSIWDEFETRVQSNKKINFKKQQKLLLQNFSYAREQEFIERNLNDTRYATIYLTSLIQQHLIFSESSSKKKVRTVSGIITSHLRSRWGFNKDRKEGHIHHALDAVIVAVTSNHMIQRVTKYYKLKELNKNLQAKQLPFPEPWEGFRLELEARISPNTQQYLKGIHFKNYADVNLSDIKPIFVSRMPKRSITGELHQETIRKFLGYNEKGKVLTAIKTKLEDIPFDANGDFPMYGKETDLYTYNAIKERYLSHEKDKRKSFQEPLYKPTKSGEIGPLIKSIKIMDTRTIVNPVNQGKGVVYNSKIARTDVFKKEDKYYLIPIYTIDLLKNILPHKAITAGKGYEDWTTIDSSFTFLFSLFPNDLIQIVPSKNKTIKARTTVSKKEILLPSLTGYFKGVHSGTAGITVETHDGSVIANVGSKQLLLFEKYQVDVLGHYTKIKEEKRMGMAI

SEQ ID NO: 285 - protein, 1078 aa, Bacillus cereus
MRYVLGLDIGIASCGWAVINQEKERIEDLGVRIFDKAENPKDGKSLAAPRRDARSTRRTLRRKKHRMQRIKVLLVKHGLLSKTELDHLYESATEVDVWNLRLDALERKLYPKEFARILIHLAKRRGFKSNRKETTLSENGQILESISENQQIMEKQNYRTVGEMILKDKKFENHKRNKNGTYVGTVTRQQLQDEIQMIFHAQRLYKNDYATEEFESSYLEIWASQRPYASKDQIEKMIGYCTLEPKEKRAPKASWSFQYFVALQTINNLRLISKDRIEELSFEEKKQIMNLALEKSIVKYIDIRKLLSVPNEFQFNSLSYSADTVDTAVESRKCIELKEYHSINKVYKQIYGENALNLLPKYYDTIAYGLTIFKDDKDILEYLQNKYVNAKGKPISNFANKTYDDTFIQALLNLNFTKMGHLSFKALKNIIPFLEEGLSYDKACEKAGYNFKGTSYTEQTKYLPVIPQNTNPVVHRALSQTRKVINAIIKKYGSPNAIHIETARELSKTFQERKEIDSMYQDNSKKNEHAIHKLKELGNINPSGINIVKFKLWNEQDGRCMYSGKYIEPHRLFEEGYTEVDHILPYSRSLDDSYNNKTLTLGTENQRKGNKIPYEYMGNTSIWNDFETRVQSNKKINKKKQQKLLLQHFSYAREQEFIERNLNDTRYATIYLSSLIQQHLIFSESSRKKKVHTVSGIITSHLRSRWGFNKDRKEGHIHHALDAVIVAVTSDHMIQRVTKYYKLKELNRNLQAKRMPFPEPWEGFRLELEARISPNTQQYLKGLRFKNYADVNLSEIKSIFVSRMPKHSITGELHQETIRKFIGYNEKGKVLTAIKTKLEDIPFDANGDFPMYGKESDLYTYNAIKERYLSHKKDKRKSFQEPLYKPTKSGGIGPLIKSIKIMDTRTIVNPVNQGKGVVYNSKIARTDVFKKEEKYYLIPIYTIDLMKNILPQKAITAGKGYEDWTTIDPSFTFLFSLFPNDLIQIVPSKNKTIKARTTVSKKEVLLPSLTGYFKGVHSGTAGITVETHDGSVIANVGSKQLLLIEKYQVDVLGNYTKIKEEKRIGLTTYNDNKKIAAC

SEQ ID NO: 286 - protein, 1088 aa, Bacillus smithii
MNYKMGLDIGIASVGWAVINLDLKRIEDLGVRIFDKAEHPQNGESLALPRRIARSARRRLRRRKHRLERIRRLLVSENVLTKEEMNLLFKQKKQIDVWQLRVDALERKLNNDELARVLLHLAKRRGFKSNRKSERNSKESSEFLKNIEENQSILAQYRSVGEMIVKDSKFAYHKRNKLDSYSNMIARDDLEREIKLIFEKQREFNNPVCTERLEEKYLNIWSSQRPFASKEDIEKKVGFCTFEPKEKRAPKATYTFQSFIVWEHINKLRLVSPDETRALTEIERNLLYKQAFSKNKMTYYDIRKLLNLSDDIHFKGLLYDPKSSLKQIENIRFLELDSYHKIRKCIENVYGKDGIRMFNETDIDTFGYALTIFKDDEDIVAYLQNEYITKNGKRVSNLANKVYDKSLIDELLNLSFSKFAHLSMKAIRNILPYMEQGEIYSKACELAGYNFTGPKKKEKALLLPVIPNIANPVVMRALTQSRKVVNAIIKKYGSPVSIHIELARDLSHSFDERKKIQKDQTENRKKNETAIKQLIEYELTKNPTGLDIVKFKLWSEQQGRCMYSLKPIELERLLEPGYVEVDHILPYSRSLDDSYANKVLVLTKENREKGNHTPVEYLGLGSERWKKFEKFVLANKQFSKKKKQNLLRLRYEETEEKEFKERNLNDTRYISKFFANFIKEHLKFADGDGGQKVYTINGKITAHLRSRWDFNKNREESDLHHAVDAVIVACATQGMIKKITEFYKAREQNKESAKKKEPIFPQPWPHFADELKARLSKFPQESIEAFALGNYDRKKLESLRPVFVSRMPKRSVTGAAHQETLRRCVGIDEQSGKIQTAVKTKLSDIKLDKDGHFPMYQKESDPRTYEAIRQRLLEHNNDPKKAFQEPLYKPKKNGEPGPVIRTVKIIDTKNKVVHLDGSKTVAYNSNIVRTDVFEKDGKYYCVPVYTMDIMKGTLPNKAIEANKPYSEWKEMTEEYTFQFSLFPNDLVRIVLPREKTIKTSTNEEIIIKDIFAYYKTIDSATGGLELISHDRNFSLRGVGSKTLKRFEKYQVDVLGNIHKVKGEKRVGLAAPTNQKKGKTVDSLQSVSD

SEQ ID NO: 287 - protein, 1069 aa, Bacillus thuringiensis
MNYDIGLRIGITSCGWSIINKDLERIEDLGVRVFEKAENPDGTASAAPRREARKSRRKHRRKKHRIERIKRLIVQHDLLSKKELDSLYLSPFNIDVWNLRVEALERKLDNREFARVLIHLVQRRGFQTIRKSVEIQEEGKLLENVSENERIMKVNGYKTVGEMFSKHEKFTHHKRNKDGSYTSVVTRSLLLKEIKTIFNSQRILGNVFSTQKLESDYLYIWGSQRPTLTYEQLMSMVGNCIYEKKEKRAPKTSWAFQYFSLLQKINKLKVSDDNTLRKLSKEERDIVIELAFKKKNVSFVDIRKALKLNDNTKFNHLTYSHVVETKKVEKATFIELKGYHLIKKQLKDRNVELTQELQPKDYDAIAAASTFFKNDIEFRDYLRNQYLDSNGKRKSNIANKVFEDKVIAAVFELNFSKVCHLSFKSLYKLIPHLEKGLDYKEAILCAGYNFRDENKRDKKLFLPVIQQETNPVVHRALTQARKVINAIIREYGSPNTIRFVVANDLAKTYKQRKELESTLKKNRAENEKIKTKLLSMGIINPTGMDIVKYKLWYEQSGICLYTGRQMELSSLFKPGYSIVNHIIPYNRSFDDTYHNRVLTLTETKYEKGNKIPFEYFGAEETCWNEYEKRVSTSKKIHDKKREKLLIRNFDIEYENEMISNNVFDTHYIGSYFEKYIDEHLQFKKSTKKQKVFSIHGNMVAHLHSRWGFNKNSREIYLNHAVDAAIVAVLTDQLIRNIADYYRRDNILEQKGSLKFPEPWKSFSIELEARISPQVRDLIKKLNLDSYLDVDILHIKPVFISKKPRRKVNGEAHKSTIRSLIGINEIGKTVTCIKTRLEDIPFDENGDFPMYGKDTDKYTYTAIKERYLEFNKDKEKAFSTPLYKLKRNGEPGNQIKSVKIIDTRNIVNKVNQGKGIAYNSNIIRVDVFSRDQKYYVVPIYLRDFIKGSLPNKIITAAKGFMQWPETDNSYTFLFSIFPNDLIKVVPKEGKFIKAKNENKENINLTEILGYFKGLDSSTGAFTLESHDGSLLARGIGTKNLLLIEKYQVDVLGRYNKVGNEERQDIKIQQN

SEQ ID NO: 288 - protein, 206 aa, Bacteroides cellulosilyticus
MKKILGLDLGCNSIGWALVNEAENTEEISSIIKLGVRVNPLTVDEMQNFEKGKSITTNADRTLKRSMRRNLQRYKLRRDTLIEVLKEHGFITDSTLLSEHGNKTTFETYRLRAKAAVEEISLEKFARVLLMINKKRGYKSSRKAKGSEDGVLIDGMDVARKLYEEGLTPGELCLQILEAGKKNLPDFYRSDLQNEFDRIWNFQKLV

SEQ ID NO: 289 - protein, 349 aa, Bacteroides coprosuis
MKKILGLDIGTNSVGWAVVNTNQEGEPSQIEKLGSRIIPMSQDILDKFGQGQTVSSTASRTDYRGIRRLRERSLLRRERLHRVLHILDFLPKHYADSIGWDPRNSKTYGKFLPGTEVKLAWVPTADGHQFLFYSTYLEMLEDLKQTQAQLFETSQTPVPLDWTIYYLRKKALTQPITKHELAWLLLHFNTKRGYYQRRGELEDTPTDKLVEYHALKVVDVEVDPEDQSKKPWYFVHLENGWIYKRQSSEPLDNWKGLVKEFIVTTHLDKEGKPKLDKEGEVRRSFSSPKEDDWTLVKKKTENDLEKSGLTVGAYIYQTLLNKPNQKIRGGLIKHIERNYYVEELEQILR

SEQ ID NO: 290 - protein, 1504 aa, Bacteroides coprosuis
MKKVLGLDIGTNSVGWAVVNQNDKGEFLSIEKIGSRIIPMSQDVMDKFGAGQTESSTAQRTQYRGVRRLRERSLLRRERLHRVLHILHFLPQHYDAAIGWNKKENKTYGKFLPGVEVNIPWVATDQGHQFIFMDSYAEMLKDLKQHQPHLFEKSSTPVPLDWTIYYLRKKALTQAISKEELAWILLNFNQKRGYYQLRGEEVEDNTKREEFYALKVVKVELDKDNTSAKTWYKVHLENGFIYPCPSDTPIDSWVGMVKDFIVTTTLEKDGSEKRTADGEIKRSFRAPKEDDWTLLKKKTESELEKSGKQVGAFIYDTLLSNPDQKIIGGLIKTIERKYYKKELEQILETQQKFIAELSDKKLFQACAEELYPLNDSHRENLLERDFKHLFVQDIIFYHRPLKTKKSLISNCTYEYRTFYKNGEKQISPIKCIAKSNPLFQEFRVWQFVQNLRILQRQRSEGDSIKYNVDVTAEFLKDENDIANLFTWLNERKVIKQDQLLKSYFKLKVNKETKELDYRWNYVDDKNKEYPCNATRTHILSFLEKCKEEKRIEDDRFVYSLWHLLYSVVEPIELRGALAKFAEREHLHPSFVDVFAQFPPLEKEYGSYSEKAIKRLLPLMRMGDYWHEDKIDVKTKQRIQRIIDGEADDDITHRSREKVENLRSITDFKGLPLWKAGYVVYNRHSESGELTKWKTPHELSNYIQNEFKQYSLRNPIVEQIVLETLRVVHDLWVKHGDFSEIHLELGRDIKNSSDKRKRMAERQQENENSRQRVLEMLIDLKKEAAFADLNPYSPSQQEKLRIVEDGVLRSNIEIPKDIEKITKSAKPTSRELTKYRLWLDQKYRSPYTGQPISLAQLFTSKYEIEHVIPQAKYFDDSFTNKVICESEVNKEKGSMLAHEFILKNGGSTVNVGGRQVQVLKNDAYVELINRLYGKNNPVKAKKLLAEDIDEVVGDFSERQLNDTRYISRVVQKLLSNIVREEDEQESTSKHVIGCSGQVTTALKKDWGLNDIWNKIIQPRFERLNEMTATEDYGVWQSPNHFQIRVPEEIQKGFTKKRIDHRHHAMDALVIACATRSHINYISNRSGQDRNAKFETTRTDLRSKLCYKENSSGNNYNYIFNKPWDTFTQDAHRALENIVVSHKQNLRVLTKTNNYTQFINKDGKKDLQKQVKGDHFAVRKPMHQETIYGRVSIRSIKEVALKKALENWKQIVDRTLKDKIRELIGAYGKYDAQTILKYFKDRDYKFNNLKINRVEVYEYDHNCAAVRKSIGDDLTIKQIERITDESIRKILMNHLSNYDDNLKEAFSPEGLMEMNKNIKELNGGKNHQPIYKVRLFEDLGSKFPLGVSHNNPDKYAIAAKGTNLFFGIYEDQEGKRMFDSIPLNIVIDRLKEKKSPVPETYNESKLKFHLSPNDLVYVPTDEEQKQPELVDVDHLSDEQKGRVYKAVSFTGNRAFFVNHRVSKVIHDYVEFGTKNKIENDDDKRSLKHICWKLKVNRLGEITDVKR

SEQ ID NO: 291 - protein, 1509 aa, Bacteroides eggerthii
MKTILGLDLGTNSVGWAVINSVIKEQAERIWIEMAGSRIIPMDAAVLGDFDKGNSISQTSERTRLRGARRLRERQLLRRERLHKVLNILGFLPNHYLEYIDFEKHPGKFLADAEPKLAWVKDEQGKYTFLFQAAFDEMLADFAIHQPSLVSGDKKIPYDWTIYYLRKKALTEMISKEELAWILLNFNQKRGYYQLRGEEEEDNAGKSVEFYALKVLTVEATDEKKGRDVWYNVHLENGWIYRRSSSVPLDWEGQVKEFIVTTDLNPDGTPKLDKYGEVKRSFRAPKEDDWMLIKKRTEADIANTHKTVGAYIYDTLLQKPQQKIIGKLVKTVERKLYRDELSLILQKQCAFHAELQDRALYARCVEALYPSNEVRRKNIANRDFVYLLMDDILFYQRPLKTKKSLIANCPYEENEYVDRETGEIKKTPLKCIAKSHPLFQEFRLWNFLSNIRIYQKEKEINGTLHLDVDVTAEFLKTEDDYVALFDWLNSRKEIEQKTFLKYPKFGLKKEISNYRWNYVEDKQYPCNETRHAILSSLEKANVCIDFLSNEKEVALWHILYSVSDKQEIEKALRTFAAKNGLDESFVEAFKKFPPFKSEYGAYSAKAIKKMLPLMRCGKYWDVSSIDDTTKERIKKIVTGEYDERISVKVRDKVMNLSDISCFRRLPLWLACYIVYNRHSEDKEAVKWESPADIDAYLASFKQHSLRNPIVEQVITETLRVVRDIWKQVGRIDEIHIELGREMKNPADKRKRMTAQILENENANLRIKALLAEFMNPEYEIENVRPYSPSQQEILRIYEDTVLHAEDQLPEEIDAILKKFNSSKVPTKSEFLRYKLWLEQKYRSPYTGELIPLGKLFTAAYEIEHVIPQSRYFDDSFSNKVICESAVNKLKDNQLGYEFIKNHHGQKVEVGFGKSVEIFSVDSYERFVKEQYAKSAVKMKKLLMDDIPEQFIERQLNDSRYISKVIKGLLSNIVREKNDSGEYEPEAVSKNIVVCTGSVTDRLKRDWGMNDVWNSIVYPRFERLNSLTDTQSFGHWENKSGKKVFQTELPLEYQKGFSKKRIDHRHHAMDAIVIACATRNHVNYLSNESASRNAKISRYDLQRLLCDKNRTDDNGNYKWVIKKPWDTFTQDAREVLSKIVVSLKQNLRIINKTTNVYRHLDATGNRVYEKQKTGDSWAIRKPMHKDTVFGAVNLRKVKVVRLSVALDTPAMIVDKRVKNKVFELLSYKYDKKRIEKYFKENAFLWKELDLAKVAVYYFTEATTEPLVAVRKPLDSTFNEKKIKESVTDTGIQKILLNHLCTKEGKPDLAFSAEGIEEMNRNLLQLNNGKSHQPIYKVRVYEPRGNKFSVGVLGNKGTKWVEAAKGTNLFFAIYITEDGKRTYETIPLNVVIEREKQGLVPVPDRNKKGDKLLFWLSPNDLVYLPTEEEREFGRINEPIDRGRIYKMVSCTGNEGHFIPANVANPIVPVIELGSNNKAQRAWTNEMIKDICIPIKVDRLGHIIEVKYRIDE

SEQ ID NO: 292 - protein, 1526 aa, Bacteroides faecis
MKKILGLDLGTNSIGWAVLNAADDNSLKYIEAAGSRIIPMDAAILGDFDRGNSISQTAERTRIRGMRHLRERYLLRRARLHRILNLLGFLPFHYAQDIDRYGNFSADMEPKIAWCKNLEGELEFIFIESFNEMLEDFRKNQPELVADNKKVPYDWVIYYLRKKALEKKISKEELAWILLNFNQKRGYYQLRGEDDDESMKTAKTRQYFDKQIIKNIIDTNQTYKGQRILIVELQNGDKGKIFKKEIPDWIGQEKNIIVTVDIDKDGNDKYEESGSLSCRFKIPTDAEWESEWKLIKMKTQKDLDESNKTVGTYIYDSILQNPTQKVRGKLVRTIERKYYKAELKQILEKQTEFHSELQDKDLYIECLNELYSNNDTHRNAITDRDFVYLFMNDILFYQRPLKSKKSLIDNCPYERNIYIDKETGEIKYSPIKCIAKSHPLFQEFRLWKFISSIRIYQRESVVEVVDKQLDLFSSQSTSVQKLVTDVDVTDKFLTCENDYVALFEWLNKKKIIDQKEFLKYRPFGLKGDIDNYRWNYVEDKSYPCNETHAMILTYFAKAGISEDILTKEMEEALWHILYSVEDRQEITKALRTFASKYHLSDSFVKVFSNIPPFKKEYGSYSAKAIKKLLSLMRMGKYWSEDAIDVNTRERIDKIVTGEYDEKIRDRVREKTIRLNDIRHFRALPDWLACYVVYDRHSETREITEWKSPEEIDEYIRNFKQHSLRNPIVEQVITETLRTVRDIWKQVGCIDEIHVELGREMKNPADKRKRITSQIIENENANLRVKALLTEFVNSEFEIENVRPYSLSQQDILRIYEDGVLNSVAEVPGDIAGILKKFNENDAKKRPTTSEILRYKLWLEQKYRSPYTGEMIPLSKLFTSAYEIEHVIPQSRYFDDSFSNKVICEAEVNKLKDNALGYEFIKKHHGEKVELGFGKIVEIFSVSVYEQFVKDNYSRNRGKMKKLLMDEIPEQFIERQLNDSRYISKVVKTLLSNVVREKAEQEAVSKNVIVCTGGVTDRLKKDWGINDVWNKIVLPRFLRLNELTNSTNFTAKNAAGNEIPAMPLELQKGFNKKRIDHRHHAMDAIVIACANRNIVNYLNNESASRKAKISRHDLQAILCDKVRTDDKGNYQWRVKKPWDTFTQDVYVALENIIVSFKQNLRVINKTSNYYWHYENGKKVLVKQVKGDSWAIRKPMHKDTVFGEVNLRKVKSVSLNEALKNPQFIVEKDLKRQLLSLLQQNFDIKKIKKYFEEHKDIWSDISLSKMNIYYFTKETKDRYFATRKPLDASFDKKKIESCITDTGIQQILLRHLELKENDPERAFSPDGIDEMNRNIIQLNKGKGHHPIAKVRVYEKADKFEVGQRGNKSSKFVEAAKGTNLFFAVYETEYPDEKTNSIVRKRNYATIPLNIAIERQKRGLSTAPEDEKGNVPSFVLSPNDLVYLPTSEDIVNGHITQPIDKSRIYKMVSSSGSQCFFIKHNIANIIVDKYEFSPLNKMERAISNEMIKEICIPVKVDRLGNIVKLGKSE

SEQ ID NO: 293 - protein, 1509 aa, Bacteroides fluxus
MKTILGLDLGTNSVGWAVINSVIKEQAERIWIEMAGSRIIPMDAAVLGDFDKGNSISQTSERTRLRGVRRLRERQLLRRERLHKVLNILGFLPNHYLEYIDFEKHPGKFLSDAEPKLPWVKDEQGKYTFLFQAAFDEMLADFAIHQPSLVSGDKKIPYDWTIYYLRKKALTEMISKEELAWILLNFNQKRGYYQLRGEEEEDNAGKSVEFYALKVLTVEATDEKKGRDVWYNVHLENGWIYRRSSSVPLDWEGQIKEFIVTTDLNPDSTPKLDKYGEVKRSFRAPKEDDWMLIKKRTEADIANTHKTVGAYIYDTLLQKPQQKIIGKLVKTVERKLYRDELSLILQKQCAFHAELQDRTLYARCVEALYPNNEVQRRNIANRDFVYLLMDDVLFYQRPLKTKKSLIANCPYEENEYVDRETGEIKKAPLKCIAKSHPLFQEFRLWNFLSNIRIYQKEKEINGTLHLDVDVTAEFLKTEDDYVALFDWLNSRKEIEQKTFLKYPKFGLKKEISNYRWNYVEDKQYPCNETRHAILSRLEKANVCIDFLSNEKEVALWHILYSVSDKQEIEKALRTFAAKNGLDESFVEAFKKFPPFKSEYGAYSAKAIKKLLPLMRCGKYWDVSSIDDTTKERIKKIVAGEYDERIAVKVRDKVMNLSDISCFKRLPLWLACYIVYNRHSEDKEAVKWESPADIDAYLASFKQHSLRNPIVEQVITETLRVVRDIWKQVGRIDEIHIELGREMKNPADKRKRMTAQILENENANLRIKALLAEFMNPEYEIENVRPYSPSQQEILRIYEDMVLHAEDQLPEEIDAILKKFNSSKVPTKSEFLRYKLWLEQKYRSPYTGELIPLGKLFTAAYEIEHVIPQSRYFDDSFSNKVICESAVNKLKDNQLGYEFIKNHHGQKVEVGFGKSVEIFSVDSYERFVKEQYAKSAVKMKKMLMDDIPEQFIERQLNDSRYISKVIKGLLSNIVREKNDSGEYEPEAVSKNIVVCTGSVTDRLKRDWGMNDVWNSIVYPRFERLNSLTDTQSFGHWENKSGKKVFQTELPLEYQKGFSKKRIDHRHHAMDAIVIACATRNHVNYLSNESASRNAKISRYDLQRLLCDKSRTDDNGNYKWVIKKPWDTFTQDAREVLSKIVVSLKQNLRIINKTTNVYRHLDATGNRVYEKQKTGDSWAIRKPMHKDTVFGAVNLRKVKVVRLSVALDAPTMIVDKRVKNKVFELLSYKYDKKRIEKYFKENAVLWKELDLARVAVYYFTEATTEPLVAVRKPLDSTFNEKKIKESVTDTGIQKILLNHLCTKEGKPDLAFSAEGIEEMNRNLLQLNNGKRHQPIYKVRVYEPRGNKFSVGVLGNKGTKWVEAAKGTNLFFAIYITEDGKRTYETIPLNMVIEREKQGLAPVPDKNEKGDKLLFWLSPNDLVYLPTEEELEFGRINEPIDRGRIYKMVSSSGNQCFFIPQSISNAIIPTKELGANNKAERSWDGAMIKNICIPVKVDRLGRIIEVKYRINE

SEQ ID NO: 294 - protein, 1436 aa, Bacteroides fragilis; identical to SEQ ID NO: 160

SEQ ID NO: 295 - protein, 1512 aa, Bacteroides nordii
MKNILGLDLGTNSIGWAVINSEEDGPIVKKRIELAGSRIIPMDAAVLGNFDSGVTKSQTAERTSFRSIRRLRERQLLRRERLHKVLQILGFLPEHYVNDIDFENHPGKIKRNTEPKLPWRKNSMGQFEFIFQDSFEAMLTDFATHQPVFVSEGKKVPYDWTLYYLRKKALTEGISKEELAWLILNFNQKRGYYQLRGEEEEEQSNKLVEFYALRVVKVEATDDKKGKDTWYNVHLENGWIYRRTSNIPLDWEGKVKEFIVTTDLNEDGTPKLDKYGEVKRSFRAPKEDDWTLIKKKTESDIANSHKTVGCYIYDALLQNPHQKIKGRLVRTVERKFYKEELRLILEKQLSFHPELQDRDLYRACIDALYVSNEAHKNNISGRDFVYLFIDDIIFYQRPLKTKKSLIDNCPYEENQYMDRETGEVKQAPIKCIAKSHPLFQEFRLWQFISNIRIYQRERVLDDGKLETDVDVTPDFLKTEDDYTTLFEWFNDRKEVDQKAFLKNPQFGLKKTFTEYRWNYVEDKSYPCNETRNAILNGLQKAGVSADFLSREVEEALWHILYSVEDKIEIESALRKFASKHDLDDRFADVFKKLPPFKKEYGAYSAKAIKKLLPLMRIGKYWELSNIDDKTKERIDKIITGEWDENIHDRVREKAIKLSDITDFKGLPLWLSCYVVYNRHSEARAIAKWESPEDIDSYLRLFRQHSLRNPIVEQVITETLRTVRDIWKRVGQIDEIHVELGREIKNPADKRAKMTAQIVENENTNLRIKALLAEFINSEYEIENVRPYSSNQQEKLKIYEDTVLNGVKEIPEDINTILKKFRESDLKKRPTKSDFLHYKLWLEQKYCSPYTGRIIPLGKLFTSAYEIEHIIPQAHYFDDSFSNKVICEAEVNGLKDKKLGYEFIKHNPGKMVEIGFGKPPVRIFSVEEYERFVKENYSGIKNKMNKLLMDDIPETFIERQLNDSRYISKVVKSLLSNIVREKDSNGEYEPEAISKNVIVCTGSVTDRLKRDWGVNDVWNSIIYPRFERLNELTGSQQFGCWENKEGKRVFQTAVPLEMQKGFSKKRIDHRHHAMDAIVIACATRNHINYLSNESASKKAKISRTDLQRLLCTKCRTDDNGNYKWIVKKPWPAFTQDIRKALENITVSFKQNLRVINKTTNYYVHFDESGKKVLEKQINGDSWAIRKPMHKDTVFGKVNLQKVKEVRLSLALDTPKMIVDKKLKEKVLQLYSYKYDKKRIDKYFKENASLWKDLNLSKVAVYYFTNDSTEPLVAVRKPLDTSFNAKKIKESVTDTGIQKILLNHLSNNQDDPNLAFSPDGIDKMNKNLTALNDGKYHQPIYKVRVCEPQGNKFSVGTSGNKTSKYVEAAKGTNLFFAVYQTEDGKRSYETIPLNVVIEREKLGWTPVPENNNNGDKLLFWLSPNDLVYVPTADELNNGMRLDNMDKGRIYKMISCSGPQCFFIPQNVSNAIIPVIELGANNKAEKSWNNEMIKVVCVPIRVDRLGCITQINNQK

SEQ ID NO: 296 - protein, 779 aa, Bacteroides oleiciplenus
MKEGNQYDVACEYAGYRHSKSSLTREEIDNKVLKNRLEILPKNSLRNPVVEKILNQMVNVVNAVIDTYGKPDEIRVELARELKKGAKEREELAKSIAQNTREHEAIRQLLQTEFGMMHVTRNDIIRYKLYEELKDNGYKTLYSDQYIPREKVFSKEIDIEHIIPQARLFDDSLSNKTLEYRAVNIEKGNKTAYDFVKEKYGNDGLRRYLNHCEALFKDKKTKLKKLKMEDQDIPDGFIDRDLRNTQYIAKKALSMLSEISRRVVATTGSITDELRKDWQLVDIMKELNLPKYEALGFVETFKDKDGRIIKKIKDWSKRNDHRHHAMDALTVAFTKDVFIQYFNNKNAFWMSGSKEHANITAIKNKYFEKGKALAPIPLELFRTEAKHHLENILVSIKAKNKVVTNNINRTKKKNGENLKLQQTPRGQLHLESIYGSYRQCIIRDEKVNASFDASKIANVSKSAYRNALLKRLEAYDNDPKKAFTGKNSLDKNPVYLDENKMEKVPDRVKIVEFETVYTIRKPIDPKLSIDKVVDARIRTLLKKRLEEYGGDAQRAFSNIEENPIWLNKEKGISVKRVAIRGISNAQALHDKKDKDGNPILDKEGKGIPTDFVNTSNNHHVAIYRKPVVDKMGQVILDENGSPRYELGEDVISFFEAVARVNLRQPVVDKDYKRSEGWQFLFSMKQNEYFVFPNEKTGFNPKEIDLLNPENYALISPNLFRVQKIGLNDYTFRHHLETSIQNNSNELKFITWIRCGKNGINGVIKVRVNHIGQIVSMGEY

SEQ ID NO: 297 - protein, 653 aa, Bacteroides oleiciplenus
MKKILGLDLGSSSIGWALVNEGANDEEKSSIIKLGVRVNPLTVDEAQNFEKGKSITTNADRTLKRGMRRNLQRYKQRREALVEVLKKHEFITAGTLMSEQGNKTTFETYRLRAKAVEEEISLEEFARVLLMINKKRGYKSSRKAKGDEDGVLIDGMDVAKKLYDEDLNPGELCLQLLEAGKKTLPDFYRSDLQDEFDKIWNFQKQFNPESFCDTAKEEVRGKNRTQTWTILSKYFVWTEGDSVWNNEEARTEERIKEYKLVGIKRTTKGYEQKLENYRWRVQALSEQLNPEIIAIVLQEINGQISASSGYLGAISDRSKELFFNHQTVGQSLMSELDKNPNGSLRNKVFYRQDYLDEFNTIWEKQSLYHKELTVELKKEIRDIIIFYQRRLKSQKGLISTCEFEQREIIVEKDGKRKTKIIGCKVIPRSHPLFQEFKIWQTLNDVEVYVADRRTKRKQDRKSTTLFSDTEDILLVEGKRYLYQEEKELLAKELFVRENMKKAEVLKLLFEDPKELDLNFKQIDGNRTGFALFSAYSKMIEKYGYESVNFKNSADEIIEKLQIIFADLGWNTELFSIDLSKDDKELEKQPYFRLWHLLYSFEGDNTPTGNGKLIEALMRLCSVEKEYASVLANVSFQEDYGSLSAKAIKKYYLI

SEQ ID NO: 298 - protein, 1436 aa, Bacteroides sp.
MKRILGLDLGTNSIGWALVDEAENKDERSSIVKLGVRVNPLTVDELTNFEKGKSITTNADRTLKRGMRRNLQRYKLRRETLMEVLKEHKLITEDTILSENGNRTTFETYRLRAKAATEKISLEEFARVLLMINKKRGYKSCRKAKGAEEGTLIDGMDIARELYNNNLTPGELCLQLLDAGKKYLPDFYRSDLQNELDRIWEKQKEYYPEILTEVLKEELRGKKRDAVWAICAKSFVWEEYYTEWNKEKGKTEQQEREHKLEGIYSKRKRDEAKRENLQWRVNGLKEKLSLEQLVIVLQEMNIQINNSSGYLGAISDRSKELYFNKQTVGQYQMEMLDKNPNASLRNMVFYRQDYLDEFNTLWEKQAEYHKELTGELKKEIRDIVIFYQRRLKSQKGLVGFCEFESRQIEVEIDGKKKIKTVGNRVIPRSSPLFQEFKIWQILNNIEVTVVGKKGKRRKQKDNSPTLFDGLDDTEQLELNGSRYLYQEEKELLAQELFVRDKMTKSDVLKLLFDNPQELDLNFKTIDGNKTGYTLFQAYSKMIEMSGHEPVDFKKTVEKVVEHVKAVFDLLNWNTDILGFNSNEELDNQSYYKLWHLLYSFEGDNTPTGNARLVQKITELYGFEKEYAIILANVTFQDDYGSLSAKAIHKILPHLKEGNRYDVACAYAGYKHSESSLTKEEIANKALKDRLTLLPKNNLRNPVVEKILNQMVNVINAIIDTYGKPDEIRVELARELKKNAKEREELTKFIAETTRKHEEFKILLQSEFGLTNVSRTDILRYKLYKELESCGYKTLYSNTYIPREKLFSKEFDIEHIIPQARLFDDSFSNKTLEARSINLEKGNKTAYDFVKEKFGESGADNSLDHYLNNIEDLFKSGKISKTKYNKLKMAEQDIPDGFINRDLRNTQYIAKKALSMLNEISRRVVATSGTITDKLRQDWQLVDVMKELNWEKYKALGLVEYFEDKDGRQIGRIKDWTKRNDHRHHAMDALTVAFTKDIFIQYFNNKNASLNSNTNEYAIKNKYFQNGRAIAPIPLREFRVEAKKHLENTLISIKAKNKVVTGNINKTKKRGGVNKYLQQTPRGQLHLETIYGSGKQYLTKEEKVNASFDMKKIATVSKSAYRDVLLKRLHENDNDPKKAFTGKNSLDKQPIWLDKEQTRKVPEKVKTVTLETIYTVRKEISPDLKVDKVIDAGVRKILTGRLNEYGNDAKKAFSNLDENPIWLNKEKGISIKRVTISGISNAQSLHVKKDKDGKPILDEDSRNIPVDFVNTGNNHHVAVYRRPVIDKRGQLVIDEAGNPKYELEEVVVSFFEAVTRANLGQPIIDKDYKTSEGWQFLFSMKQNEYFVFPNEKTGFNPKEIDLLDAENYGVISPNLFRVQKFAHKNYVFRHHLETTIKDTSSILKGITWIDFRSSKGLDAIVKVRVNHIGQIVSVGEY

SEQ ID NO: 299 - protein, 1510 aa, Bacteroides sp.
MKRILGLDLGTNSIGWALVDSEEQRILGMGSRIIPMDQGVLDTFSGGNPVETQTAARTAYRGTRRLRERALLRRERLIRVLNMMKFLPEHYASQIDFEKRLGQFFDEKEPKLAWKQNDEGRFEFIFQQSFNEMIEEFKNKGVVREDKKIPYDWTIYYLRKKALSQEIEKEELAWILLNFNQKRGYYQLRGEEEEENPNKLVEYYSLKIVDVIADEKPNSKGDIWYSLHLENGWIYRRSSKIPLFGWKDKTRDFIVTTDLNDDGTVKKDKEGIEKRSFRAPSENDWVLLKKKTESDIEKSHKTVGAYVYETLLQNPMQKVRGKLVRTIERKFYKDELKQILEKQREFHPELRDEDLYNDCVRELYRSNETYQFILSKRDFVHLFLDDILFYQRPLRSQKSAIGDCILEFKTYKDKDGNNIKEYLKVISKSNPLYQEFRIWQWLYNLKIYRKEDDEDVTLQFIANIEDKEQLFDFLSNRKSIEQKPLLEYLIKAKGLKKQVKTEAYRWNYVEDKIYPCSETKTMISTRLAKVENIPDNFFTKEIEQKLWHIIYSVTDKNEFEKALRTFAKKYDLDIASFVDNFKKIPPFKNEYGSFSEKAIKKLLPLMRLGKYWKWNDIDNNTQNRISKIITGEYDEEIKDIVREKSIALTNENDFQGLQLWLAQYLVYGRHSEADIAGKWHSVADLEKYLNEFKQHSLRNPIVEQIITETLRVVRDIWRKYGQGAENFFSEIHVELGRDMKNTADERKKIVNVVTENENTNLRIKALLMELKNNSDGKLEVENVRPYSPTQQDILKIYEEYAISTGLDNEKDEKVKEDIKKISRVAQPTTTELQRYKLWLEQKYCSPYTGKVIPLGKLFTEEYQIEHIIPKSRYYDDSFSNKVICEAAVNKLKDKCLGLEFIKNYHGQIVETGFGQKVTIFDEEAYQNFVKQHYAYNRSKRTKLLLEEIPEKMIERQMNDTRYISKFVLPLLSNLVRAEENDNGVNSKNVLPVNGKITTMLKQDWGLNDVWNDLILPRFVRMNELAKTIAFTSWNEQHQKYLPTVPLELSKGFQKKRIDHRHHAMDALVIACATRDHVNLLNNKHANTDTIRYDLQRKLRLFERVTYIDPQTKNNVTKDIPKEFKKPWDNFTVDARNELEKIIVSFKQNLRIINKATNIYTKYENGKKIKVGQKGLNWAIRKPLHKETVFAKVSLRKRKTVRLSEALKDWKKIVDKKLKQEIKRLTCQYGKFDVDTILRYFKDRKYQFGEVDVSKVKMYYFDEENAAVRKNVDTSFTEKFIQGSVTDTGIQKILLNHLEAKGNKVEIAFSPEGIEEMNKNIIQLNEGKLHLPIFKVRVYETIGNKFSVGVKGNKKDKYVEAAKGTNLFFAIYVDENGIRSYETIPLNIVIERLKQGLSVVPEKNRKEHSLLFYLSPNDLVYVPIEDERENIHAVNLDQLNNEQRKRIYKMVSCTGSECHFVPYYVASPIVNKVEYSSLNKIGRSLTGEMIKDVCIKLKVDRLGNVKGISGL

SEQ ID NO: 300 - protein, 1436 aa, Bacteroides sp.
MKRILGLDLGTNSIGWALVNEAENKDERSSIVKLGVRVNPLTVDELTNFEKGKSITTNADRTLKRGMRRNLQRYKLRRETLTEVLKEHKLITEDTILSENGNRTTFETYRLRAKAVTEEISLEEFARVLLMINKKRGYKSSRKAKGVEEGTLIDGMDIARELYNNNLTPGELCLQLLDAGKKFLPDFYRSDLQNELDRIWEKQKEYYPEILTDVLKEELRGKKRDAVWAICAKYFVWKETYTEWNKEKGKTEQQEREHKLEGIYSKRKRDEAKRENLQWRVNGLKEKLSLEQLVIVFQEMNTQINNSSGYLGAISDRSKELYFNKQTVGQYQMEMLDKNPNASLRNMVFYRQDYLDEFNMLWEKQAVYHKELTEELKKEIRDIIIFYQRRLKSQKGLIGFCEFESRQIEVDIDGKKKIKTVGNRVISRSSPLFQEFKIWQILNNIEVTVVGKKRKRRKLKENYSAIFEELNDAEQLELNGSRRLCQEEKELLAQELFVRDKMTKSEVLKLLFDNPQELDLNFKTIDGNKTGYALFQAYSKMIEMSGHEPVDFKKPVEKVVEYIKAVFDLLNWNTDILGFNSNEELDNQSYYKLWHLLYSFEGDNTPTGNGRLIQKMTELYGFEKEYATILANVSFQDDYGSLSAKAIHKILPHLKEGNRYDVACVYAGYRHSESSLTREEIANKVLKDRLMLLPKNSLHNPVVEKILNQMVNVINVIIDIYGKPDEIRVELARELKKNAKEREELTKSIAQTTKANEEYKTLLQTEFGLTNVSRTDILRYKLYKELESCGYKTLYSNTYISREKLFSKEFDIEHIIPQARLFDDSFSNKTLEARSVNIEKGNKTAYDFVKEKFGESGADNSLEHYLNNIEDLFKSGKISKTKYNKLKMAEQDIPDGFIERDLRNTQYIAKKALSMLNEISHRVVATSGSVTDKLREDWQLIDVMKELNWEKYKALGLVEYFEDRDGRQIGRIKDWTKRNDHRHHAMDALTVAFTKDVFIQYFNNKNASLDPNANEHAIKNKYFQNGRAIAPMPLREFRAEAKKHLENTLISIKAKNKVITGNINKTRKKGGVNKNMQQTPRGQLHLETIYGSGKQYLTKEEKVNASFDMRKIETVSKSAYRDALLKRLYENDNDPKKAFAGKNSLDKQPIWLDKEQMRKVPEKVKIVTLEAIYTIRKEISPDLKVDKVIDVGVRKILIDRLNEYGNDAKKAFSNLDKNPIWLNKEKGISIKRVTISGISNAQSLHVKKDKDGKPILDENGRNIPVDFVNTGNNHHVAVYYRPVIDKRGQLVVDEAGNPKYELEEVVVSFFEAVTRANLGLPIIDKDYKTTEGWQFLFSMKQNEYFVFPNEKIGFNPKEIDLLDVENYGLISPNLFRVQKFSLKNYVFRHHLETTIKDTSSILRGITWIDFRSSKGLDTIVKVRVNHIGQIVSVGEY

SEQ ID NO: 301 - protein, 1424 aa, Bacteroides sp.
MKRILGLDLGTNSIGWALVNEAETDEEVSSIIRLGVRVNPLTVDETQNFEKGKSITTNAERTLKRSMRRNLQRYKLRRDALVEFLKELGFITDETILSEQGNRTTFETCRLRAKAAEEEISLEELSRVLLMINKKRGYKSSRKVKKEEDGVLIDGMEIAKKLYEEDLTPGQLCSQLLESGKKVLPDFYHSDLQEELDRIWSVQKQFHPDVFCDAAKEEIKGKNRSQTWAILANYFVWKEEVVGWNDREAKNETIEKECKLVGLKRTTKGYELKKENYRWRAQALTEQLGLEEIAVVLQEINGQINASSGYLGAISDRSKVLYFNHQTVGQYQMAELDKNPHASLRNMVFYRQDYLDEFDRIWEKQAEFHKELTAELKKEIRDMIIFYQRRLKSQKGLISFCEFERLEIVVEKDGKKQTKVIGCKVIPRSHPLFQEFKVWQTLNDIKVLGREKKRNALSASESRALYPEEKEILARELAIKENMKKADVLKLLFENPQELDLNFKQIDGNRTGFSLFSAYSKMIEKYGYEPLDFKKPADEIIGQLRTIFTDLGWNTNLFTIDLTKEGKELEMQPYFRLWHLLYSFEGDNTSTGNGKLIEKIMQLCGVEKEYAVELASLSFQDDYGSLSAKAIKRILPYLKEGNLYDVACEYAGYRHSKSSLTKEEIENKVLKGKLEVLPKNSLRNPVVEKILSQMVNVINTIIDTYGKPDEIRVELARELKKSAKEREELTKAIAKSTREHEEIRKLLQDEFGMMNVSRNDIIRYKLYEELKDNGYKTLYSNQYIPKEKIFSKEIDIEHIIPQSRLFDDSLSNKTLEYKAINIEKGNKTAYDFVKEKYGEEGLQQYINRCESLFNDKKAKLRKLKMEQKDIPDGFIDRDLRNTQYIAKKALAMLNEICRRVVATTGSITDQLREDWQLVDVMKELNLPKYEALGFVETYEDKDGRKIKRIKDWTKRNDHRHHAMDALTVAFTKDAFIQYFNNKNAAQDSGNRNHTNIIGIKTRYFDKGRALPPIPLEQFRIEAKQHLEKLLVSIKAKNKVVTVNVNRTKKRKGENTKIQQTPRGQLHLETVYGSHKQYVTKIEKVNASFDAAKIATVSKRAYRNALLKRLETFGNDPKKAFTGKNALEKNPLYADKYQTIRVPEKVQTVEFETIYTIRKPVDPALNVDKVVDVKVRAILERRLKEYGGDPKKAFVNFWENPIWLNKEKGISIKRVSIRGINNAQSIHVKKDKNGNPIWDENGKQIPVDFVNTGNNHHVAIYRKPVLDKKGQVTFDEDGNLMYELDEVVVPFFEAVTRANLGLPIIDKDYRKSEGWQFLFSMKQNEYFVFPNEKTGFNPKEVDLLNPDNYAMISPNLFRVQTMSKVMYGNNVVRDYKFRHHLETTVKDMKELKDIAYKQYKTLSFGNSVVKIRINHIGQIVSVGEY

SEQ ID NO: 302 - protein, 1055 aa, Bacteroides sp.
MRIYRKDLAQDVDVTNELLKTEEDYVALFDWLNGKKEIDQKAFLKYPLFGLKKEVENYRWNYVQDKPYPCNETRSSMLARLEKCDISIEFLTKENEEALWHILYSVEDKNEIVKALQKFADKHDLNASFVDVFQKFPPFKKEYGSYSAKAIKKLLPLMRMGKYWSENSIDKGTRERMDKIITGEYDEKIENRVREKAIHLADVSDFKGLPLWLVCYIVYGRHSEAKEITQWKSPADIDLYLRSFKQHSLRNPIVEQIIIETLRVVRDIWKQVGNIDEIHVELGREMKNPADKRKKMTQQMSENENTNLRIKYLLTEFLNPEYEVENVRPYSPSQQDILRIYEEGVLNSVSDLPEEISDILKKFTETDLKKRPSRSEVLRYKLWLEQKYRSPYTGEVIPLGKLFTPAYEIEHVIPQSCYFDDSFSNKVICEAEVNKLKSNLLGHEFIVKHHGEIVELPFGKKVRIFTVDEYEQFVKDNYSRTRSKMKKLLMDDIPEEFVARQLNDSRYISKVVKSLLSNIVREKGEEEAISKNVIPCTGGVTDRLKKDWGINEVWNKIILPRFQRLNELTGTNKFTTKNVGIQEIPTMPLELQKGFNKKRIDHRHHAMDAIIIACANRNIINYLNNESATAKAELSRYDLQKMLCDKAKTDNNGNYKWVIRKPWASFTQDTYLALENIIVSFKQNLRVINKATNHFLHYNEEGKKIFVKQGKGDNWAIRKSMHKDTVFGEVNLRRIKTVALNEAMKNPQSIVVKDFKRKLLELWNLGFDAKRIKKYFEDNRETWSDINLSKIEVYYFSKDTKDRFFATRKPLDTSFDRKKIENNITDTGIQKILLRHLELKDNNPDIAFSPDGIDEMNRNIIQLNNGKYHQPIIKVRWYEQADKFAVGQTGNKSSKFVEAAKGTNLFFAVYESNILDKKTNTIIKKRNYATIPLNVAIERQKQGLPVAPEDENGNDPIFVLSPNDLVYLPTAADLANGIIAQPLDRGRIYKMVSCTGNEGYFIPARIANPILQTIELGSNNKAQKAWTDEMIKEICMPIKVDRLGNVLESSSSYKK

SEQ ID NO: 303 - protein, 1055 aa, Bacteroides sp.
MRIYRKDLAQDVDVTNELLKTEEDYVALFDWLNGKKEIDQKAFLKYPVFGLKKEIENYRWNYVQDKPYPCNETRSLMLARLEKCDISIEFLTKENEEALWHILYSVEDKNEIVKALQKFADKHDLNASFVDVFQKFPPFKKEYGSYSAKAIKKLLPLMRMGKYWSENSIDKGTRERIDKIITGEYDEKIENRVREKAIHLADVSDFKGLPLWLVCYIVYGRHSEAKEIIQWKSPADIDSYLRSFKQHSLRNPIVEQIIIETLRVVRDIWKQVGNIDEIHVELGREMKNPADKRKKMTQQMSENENTNLRIKYLLTEFLNPEYEVENVRPYSPSQQDILRIYEEGVLNSVSDLPEEISDILKKFTETDLKKRPSRSEVLRYKLWLEQKYRSPYTGEVIPLGKLFTPAYEIEHVIPQSCYFDDSFSNKVICEAEVNKLKSNLLGHEFIVKHHGEIVELPFGKKVRIFTVDEYEQFVKDNYSRTRSKMKKLLMDDIPEEFVTRQLNDSRYISKVVKSLLSNIVREKGEEEAISKNVIPCTGGVTDRLKKDWGINEVWNKIILPRFQRLNELTGTNKFTTKNVGIQEIPTMPLELQKGFNKKRIDHRHHAMDAIIIACANRNIINYLNNESATAKAELSRYDLQKMLCDKAKTDNNGNYKWVIRKPWASFTQDTYLALENIIVSFKQNLRVINKATNRFLHYNEEGKKIFVKQGKGDNWAIRKSMHKDTVFGEVNLRRIKTVALNEAMKNPQSIVVKDFKRKLLELWNLGFDAKRIKKYFEDNRETWSDINLSKIEVYYFSKDTKDRFFATRKPLDTSFDRKKIENNITDTGIQKILLRHLELKDNNPDIAFSPDGIDEMNRNIIQLNNGKYHQPIIKIRWYEQADKFAVGQTGNKSSKFVEAAKGTNLFFAVYESNILDKKTNTIIKKRNYATIPLNVAIERQKQGLPVAPEDENGNDPIFVLSPNDLVYLPTDDELANGIIAQPLDRGRIYKMVSSSGEQCFFIKHIVANVLVDKFEFSPLNKMERALTGEMIKMICIPIKVDRLGNVLESSSSYKK

SEQ ID NO: 304 - protein, 286 aa, Bacteroides uniformis
MLSYKYDKKKIEKYFKENAFLWKELDIAKVAVYYFTENTTEPLVAVRKSLDSTFNEKKIASVTDTGIQKILLNHLKSKEGKAELAFSAEGIEEMNRNLLQLNDGKGHQPIYKVRVYEPRGNKFKVGVLGNKGAKWVEAAKGTNLFFAIYITEDGNRTYETIPLNWVIEREKQGLVPVPDRNEKGDKLLFWLSPNDLVYLPTEEERDFGRINEPIDRGRIYKMVSSSGNQCFFIPQSISNAIISTKELGSNNKAEKSWDGEMIKNICIPVKVDRLGRIIEVKYRVNE

SEQ ID NO: 305 - protein, 1508 aa, Bacteroides uniformis
MRTILGLDLGTNSIGWAVINSVIKEQTERIWIEMAGSRIIPMDAAILGDFDKGNSISQTAERTRFRGVRRLRERQLLRRERLHKVLKILGFLPEHYLKGIDFEKHTGKFLSGSEPKLPWVKDRWGKYSFLFQTAFNEMLADFAKHQPSLVFDGKKIPYDWTVYYLRKKALTEMISKEELAWILLNFNQKRGYYQLRGEEEEDNAGKSVEFYALKVLSVEATDEKKGRDIWYNVHLENGWVYRRSSNVPLDWEGRVKEFIVTTDLNPDGTPKLDKYGEVKRSFRAPKEDDWMLIKKRTEADITGTHKTIGSYIYDALLQEPQQKIIGKLVKTVERKFYKEELNFILQKQCAFHAELQDRDLYMRCIEALYPGNEVQRRNIANRDFIYLLIDDVLFYQRPLKTKKSLIANCPYEENEYVNRKTGEIKTAPLKCIAKSHPLFQEFRLWYFLSNIRVYQKEREVNGTLHLDVDVTTEFLKTEDDYVALFDWLNSRKEIDQKAFLRYPAFGLKKEINNYRWNYVEDKFYPCNETRHAILSRLEKAGIGIDFLSDEKETALWHILYSVSDKQEIEKALATFAVKNGLNESFVEVFKKFPPFKSEYGAYSAKAIKKLLPLMRCGKYWDMSLIDGTTKERIERIIAGECDESIGAKVREKAMNLSDISCFKRLPLWLACYVVYNRHSEDKEITKWETPADIDAYLAAFKQHSLRNPIVEQVITETLRVVRDIWKQVGKIDEIRIELGREMKNPADKRKRMTTQILENENANLRIKALLAEFVNPEYGVENVRPYSPSQQEILRIYEDAVLKGEEQIPEDIDVILKKFNTSKLPTKSEFLRYKLWLEQKYRSPYTGELIPLAKLFTAAYEIEHVIPQSRYFDDSFSNKVICESAVNKLKDNQLGYEFIKNHHGQKVEVGFGKTVEIFSVDSYERFVKEQYAKSGIKMKKLLMDDIPEQFIERQLNDSRYISKVVKGLLSNIVREKNDSGEYEPEAVSKNILVCTGSVTDRLKKDWGMNDVWNSIVSPRFERLNALTETQCFGHWENKDGKKVFQTAVPLEYQKGFSKKRIDHRHHAMDAIVIACATRNHVNYLNNESASRNAKISRYDLQRLLCDKSRGDGNGNYRWIIKKPWTTFTQDAREALSGIIVSLKQNLRIINKTTNIYQHFDANGTRVYEKQKIGDSWAIRKPMHKDTVFGAVNLRKVKVVRLSVALDTPSMIVNKRVKNKVLELLSYKYDKKKIEKYFKENAFLWKELDIAKVAVYYFTENTTEPLVAVRKSLDSTFNEKKIASVTDTGIQKILLNHLKSKEGKAELAFSAEGIEEMNRNLLQLNDGKGHQPIYKVRVYEPRGNKFKVGVLGNKGAKWVEAAKGTNLFFAIYITEDGNRTYETIPLNWVIEREKQGLVPVPDRNEKGDKLLFWLSPNDLVYLPTEEERDFGRINEPIDRGRIYKMVSSSGNQCFFIPQSISNAIISTKELGSNNKAEKSWDGEMIKNICIPVKVDRLGRIIEVKYRVNE

SEQ ID NO: 306 - protein, 1210 aa, Bacteroides uniformis
MRTILGLDLGTNSIGWAVINSVIKEQTERIWIEMAGSRIIPMDAAILGDFDKGNSISQTAERTRFRGVRRLRERQLLRRERLHKVLKILGFLPEHYLKGIDFEKHTGKFLSGSEPKLPWVKDRWGKYSFLFQTAFNEMLADFAKHQPSLVFDGKKIPYDWTVYYLRKKALTEMISKEELAWILLNFNQKRGYYQLRGEEEEDNAGKSVEFYALKVLSVEATDEKKGRDIWYNVHLENGWVYRRSSNVPLDWEGRVKEFIVTTDLNPDGTPKLDKYGEVKRSFRAPKEDDWMLIKKRTEADITGTHKTIGSYIYDALLQEPQQKIIGKLVKTVERKFYKEELNFILQKQCAFHAELQDRDLYMRCIEALYPGNEVQRRNIANRDFIYLLIDDVLFYQRPLKTKKSLIANCPYEENEYVNRKTGEIKTAPLKCIAKSHPLFQEFRLWYFLSNIRVYQKEREVNGTLHLDVDVTTEFLKTEDDYVALFDWLNSRKEIDQKAFLRYPAFGLKKEINNYRWNYVEDKFYPCNETRHAILSRLEKAGIGIDFLSDEKETALWHILYSVSDKQEIEKALATFAVKNGLNESFVEVFKKFPPFKSEYGAYSAKAIKKLLPLMRCGKYWDMSLIDGTTKERIERIIAGECDESIGAKVREKAMNLSDISCFKRLPLWLACYVVYNRHSEDKEITKWETPADIDAYLAAFKQHSLRNPIVEQVITETLRVVRDIWKQVGKIDEIRIELGREMKNPADKRKRMTTQILENENANLRIKALLAEFVNPEYGVENVRPYSPSQQEILRIYEDAVLKGEEQIPEDIDVILKKFNTSKLPTKSEFLRYKLWLEQKYRSPYTGELIPLAKLFTAAYEIEHVIPQSRYFDDSFSNKVICESAVNKLKDNQLGYEFIKNHHGQKVEVGFGKTVEIFSVDSYERFVKEQYAKSGIKMKKLLMDDIPEQFIERQLNDSRYISKVVKGLLSNIVREKNDSGEYEPEAVSKNILVCTGSVTDRLKKDWGMNDVWNSIVSPRFERLNALTETQCFGHWENKDGKKVFQTAVPLEYQKGFSKKRIDHRHHAMDAIVIACATRNHVNYLNNESASRNAKISRYDLQRLLCDKSRGDGNGNYRWIIKKPWTTFTQDAREALSGIIVSLKQNLRIINKTTNIYQHFDANGTRVYEKQKIGDSWAIRKPMHKDTVFGAVNLRKALIPQHYNLTLFISS

SEQ ID NO: 307 - protein, 1504 aa, Bacteroides vulgatus
MKNIVGLDLGTNSIGWAVVNGSVNDDGSEQLVKIQASGSRIIPMDAAMIGDFNKGNSISQTAERTRLRGVRRLSERYLLRRERLHRILDILGFLPFHFAQDLDRHGKIVKGKEPKLAWRKNEAGQFEFIFQDSFKEMLEDFKLNHPNLITDDKKVPYDWTIYYLRKKGLTSKISKEELAWILLNFNQKRGYYQLRGEEEEENKNKLVEFYALKVVAVEDSGEKKGKDIWYNVHLENGWVYRRTSNMPLDWVGKTKEFIVTTDLEKDGTPKKDKEGNVKRSFRAPKEDDWSLLKKKTEADIDQTHKTVGVYIYDTLLGNPSQKIRGRLVRTIERKYYKEELKQILEKQKEFHLELQDRALYAACIEELYPINEAHRNNVGNRDFTYLFLEDILFYQRPLKSKKSLIDNCPYEENQGLDKETGEIKSFPVKCIAKSHPLFQEFRLWQFIVNLRIYRKDLAQDVDVTNELLKTEEDYVALFDWLNGKKEIDQKAFLKYPVFGLKKEIENYRWNYVQDKPYPCNETRSLMLARLEKCDISIEFLTKENEEALWHILYSVEDKNEIVKALQKFADKHDLNASFVDVFQKFPPFKKEYGSYSAKAIKKLLPLMRMGKYWSENSIDKGTRERIDKIITGEYDEKIENRVREKAIHLADVSDFKGLPLWLVCYIVYGRHSEAKEITQWKSPADIDSYLRSFKQHSLRNPIVEQIIIETLRVVRDIWKQVGNIDEIHVELGREMKNPADKRKKMTQQMSENENTNLRIKYLLTEFLNPEYEVENVRPYSPSQQDILRIYEEGVLNSVSDLPEEISDILKKFTETDLKKRPSRSEILRYKLWLEQKYRSPYTGEVIPLGKLFTPAYEIEHVIPQSCYFDDSFSNKVICEAEVNKLKSNLLGHEFIVKHHGEIVELPFGKKVRIFTVDEYEQFVKDNYSRTRSKMKKLLMDDIPEEFVTRQLNDSRYISKVVKSLLSNIVREKGEEEAISKNVIPCTGGVTDRLKKDWGINEVWNKIILPRFQRLNELTGTNKFTTKNVGIQEIPTMPLELQKGFNKKRIDHRHHAMDAIIIACANRNIINYLNNESATAKAELSRYDLQKMLCDKAKTDNNGNYKWVIRKPWASFTQDTYLALENIIVSFKQNLRVINKATNRFLHYNEEGKKIFVKQGKGDNWAIRKSMHKDTVFGEVNLRRIKTVALNEAMKNPQSIVVKDFKRKLLELWNLGFDAKRIKKYFEDNRETWSDINLSKIEVYYFSKDTKDRFFATRKPLDTSFDRKKIENNITDTGIQKILLRHLELKDNNPDIAFSPDGIDEMNRNIIQLNNGKYHQPIIKIRWYEQADKFAVGQTGNKFSKFVEAAKGTNLFFAVYESNILDKKTNTIIKKRNYATIPLNVAIERQKQGLPVAPEDENGNDPIFVLSPNDLVYLPTDDELANGIIAQPLDRGRIYKMVSCTGNEGHFIPARIANPILQTIELGSNNKAQKAWTDEMIKEICMPIKVDRLGNVLESSSSYKK

SEQ ID NO: 308 - protein, 1153 aa, Barnesiella intestinihominis
MKNILGLDLGLSSIGWSVIRENSEEQELVAMGSRVVSLTAAELSSFTQGNGVSINSQRTQKRTQRKGYDRYQLRRTLLRNKLDTLGMLPDDSLSYLPKLQLWGLRAKAVTQRIELNELGRVLLHLNQKRGYKSIKSDFSGDKKITDYVKTVKTRYDELKEMRLTIGELFFRRLTENAFFRCKEQVYPRQAYVEEFDCIMNCQRKFYPDILTDETIRCIRDEIIYYQRPLKSCKYLVSRCEFEKRFYLNAAGKKTEAGPKVSPRTSPLFQVCRLWESINNIVVKDRRNEIVFISAEQRAALFDFLNTHEKLKGSDLLKLLGLSKTYGYRLGEQFKTGIQGNKTRVEIERALGNYPDKKRLLQFNLQEESSSMVNTETGEIIPMISLSFEQEPLYRLWHVLYSIDDREQLQSVLRQKFGIDDDEVLERLSAIDLVKAGFGNKSSKAIRRILPFLQLGMNYAEACEAAGYNHSNNYTKAENEARALLDRLPAIKKNELRQPVVEKILNQMVNVVNALMEKYGRFDEIRVELARELKQSKEERSNTYKSINKNQRENEQIAKRIVEYGVPTRSRIQKYKMWEESKHCCIYCGQPVDVGDFLRGFDVEVEHIIPKSLYFDDSFANKVCSCRSCNKEKNNRTAYDYMKSKGEKALSDYVERVNTMYTNNQISKTKWQNLLTPVDKISIDFIDRQLRESQYIARKAKEILTSICYNVTATSGSVTSFLRHVWGWDTVLHDLNFDRYKKVGLTEVIEVNHRGSVIRREQIKDWSKRFDHRHHAIDALTIACTKQAYIQRLNNLRAEEGPDFNKMSLERYIQSQPHFSVAQVREAVDRILVSFRAGKRAVTPGKRYIRKNRKRISVQSVLIPRGALSEESVYGVIHVWEKDEQGHVIQKQRAVMKYPITSINREMLDKEKVVDKRIHRILSGRLAQYNDNPKEAFAKPVYIDKECRIPIRTVRCFAKPAINTLVPLKKDDKGNPVAWVNPGNNHHVAIYRDEDGKYKERTVTFWEAVDRCRVGIPAIVTQPDTIWDNILQRNDISENVLESLPDVKWQFVLSLQQNEMFILGMNEEDYRYAMDQQDYALLNKYLYRVQKLSKSDYSFRYHTETSVEDKYDGKPNLKLSMQMGKLKRVSIKSLLGLNPHKVHISVLGEIKEIS

SEQ ID NO: 309 - protein, 1352 aa, Belliella baltica
MKKILGLDLGTTSIGWAFIKEPEKDVVGSEIVDMGVRIVPLSSDEENDFAKGNTISINADRTLKRGARRNLQRFKQRRNALLEIFKEKKLISTNFKYAEDGPSSTFSTLNLRAKAAKEKIELQDLVKVLLQINKKRGYKSSRKAKSEEDDGSAIDSMGIAKELYENDLTPGQWVYEALQKGRKNVPDFYRSDLQEEFKKIVNYQSEFFPDIFNASFVEDWMGKASTPTKQYFNKKGVQLAENKGKREERRLQEYKWRAEAVNFKIDLSEIALILSQINSQISNSSGYLGAISDRSKELYFKNLTVGQYLYQQIKKNPHTRLKGQVFYRQDYLDEFERIWSVQSSFYPQLNDALKREVRDITIFFQRRLKSQKHLISNCEFEDHHKVVPKSHPVFQEFRIWQNLNNLLLIKKDNLNEKFDLELESKIALANELAFKRELNVKDALKILGLKPNEWEFNFTKIEGNRTNQAFFDAFAKIIELEDGEPIDLGDLKADDILDQFSEAFLRIGIDTELLQVNSDIEGAEYEKQSYIQFWHLLYSSEDDQKLKLNLIRKFGFKPEHAKILASISLQDDHASLSSRAIKKILPHLQSGLIYDKACTYAGYNHSSSFTKDENEKRELRAELELLKKNSLRNPVVEKILNQMINVVNAILKDPELGRPDEIRVEMARELKANAEQRKNMTSNIASATRDHDKYREILKSEFGLKRVTKNDLLRYKLWLETDGISLYTGKPIEASKLFSKEYDIEHIIPKARLFDDSFSNKTICERQLNIDKANVTAFSFLQNKLSADEFEQYQSRVKSLYGKLSKAKIQKLLMANDKIPEDFIARQLQETRYISKKAKEILFEISRRVSVTTGTITDKLREDWGLVEIMKELNWEKYDKLGLTYTIEGKHGERLNKIKDWSKRNDHRHHAMDALTVALTKPAYIQYLNNLNAKGLNNKKGTEVFAIEQKYLKRENGKLCFIPPIENIRSEAKKHLSRILVSYKAKNKVVTINKNKTKSKAGLNEQIALTPRGQLHKETVYGKSFHYSTKFEKIGASFNVQKINTVAKKEEREALLKRLAENGNDPKKAFTGKNTLNKMPIYLDLGKNIKLSEKVKTVVLEQNYTIRKNIDPDLKVDKVIDVGIKRILESRLEEFGGNAKLAFSNLEENPIWLNKEKGISIKRVKISGVSNVESLHVKKDHFGEPILDQEGNEIPVDFVSTGNNHHVAIYEDENGNLQEEVVSFFEAVVRQNQGLPIIKKNHTLGWKFLFTLKQNEYFVFPSDDFVPADVDLMDEQNYHLISPNLFRVQKIARKNYVFNNHLETKAVDNDLLKSKKELSKITYHFYQTPEHLRGIIKIRINHLGKIIQIGEY

SEQ ID NO: 310 - protein, 1415 aa, Bergeyella zoohelcum
MKHILGLDLGTNSIGWALIERNIEEKYGKIIGMGSRIVPMGAELSKFEQGQAQTKNADRRTNRGARRLNKRYKQRRNKLIYILQKLDMLPSQIKLKEDFSDPNKIDKITILPISKKQEQLTAFDLVSLRVKALTEKVGLEDLGKIIYKYNQLRGYAGGSLEPEKEDIFDEEQSKDKKNKSFIAFSKIVFLGEPQEEIFKNKKLNRRAIIVETEEGNFEGSTFLENIKVGDSLELLINISASKSGDTITIKLPNKTNWRKKMENIENQLKEKSKEMGREFYISEFLLELLKENRWAKIRNNTILRARYESEFEAIWNEQVKHYPFLENLDKKTLIEIVSFIFPGEKESQKKYRELGLEKGLKYIIKNQVVFYQRELKDQSHLISDCRYEPNEKAIAKSHPVFQEYKVWEQINKLIVNTKIEAGTNRKGEKKYKYIDRPIPTALKEWIFEELQNKKEITFSAIFKKLKAEFDLREGIDFLNGMSPKDKLKGNETKLQLQKSLGELWDVLGLDSINRQIELWNILYNEKGNEYDLTSDRTSKVLEFINKYGNNIVDDNAEETAIRISKIKFARAYSSLSLKAVERILPLVRAGKYFNNDFSQQLQSKILKLLNENVEDPFAKAAQTYLDNNQSVLSEGGVGNSIATILVYDKHTAKEYSHDELYKSYKEINLLKQGDLRNPLVEQIINEALVLIRDIWKNYGIKPNEIRVELARDLKNSAKERATIHKRNKDNQTINNKIKETLVKNKKELSLANIEKVKLWEAQRHLSPYTGQPIPLSDLFDKEKYDVDHIIPISRYFDDSFTNKVISEKSVNQEKANRTAMEYFEVGSLKYSIFTKEQFIAHVNEYFSGVKRKNLLATSIPEDPVQRQIKDTQYIAIRVKEELNKIVGNENVKTTTGSITDYLRNHWGLTDKFKLLLKERYEALLESEKFLEAEYDNYKKDFDSRKKEYEEKEVLFEEQELTREEFIKEYKENYIRYKKNKLIIKGWSKRIDHRHHAIDALIVACTEPAHIKRLNDLNKVLQDWLVEHKSEFMPNFEGSNSELLEEILSLPENERTEIFTQIEKFRAIEMPWKGFPEQVEQKLKEIIISHKPKDKLLLQYNKAGDRQIKLRGQLHEGTLYGISQGKEAYRIPLTKFGGSKFATEKNIQKIVSPFLSGFIANHLKEYNNKKEEAFSAEGIMDLNNKLAQYRNEKGELKPHTPISTVKIYYKDPSKNKKKKDEEDLSLQKLDREKAFNEKLYVKTGDNYLFAVLEGEIKTKKTSQIKRLYDIISFFDATNFLKEEFRNAPDKKTFDKDLLFRQYFEERNKAKLLFTLKQGDFVYLPNENEEVILDKESPLYNQYWGDLKERGKNIYVVQKFSKKQIYFIKHTIADIIKKDVEFGSQNCYETVEGRSIKENCFKLEIDRLGNIVKVIKR

SEQ ID NO: 311 - protein, 1430 aa, Bergeyella zoohelcum
MKHILGLDLGTNSIGWAVVKEAQNDNEQSEIVDVGVRVNPLTTDEKTNFEKGKPISTNADRTLKRSARRNLQRYKLRRKELIELLKEHQLISTDTILTENGKGTTFQTLELRAKSAKEKISLEELARVFLTINKKRGYKSSRKAKNEDEGQLIDGMEIAKRLYEENLTTGQLSLQLLKEGKKSLPDYYRSDLQFELDKVWNFQKQFHSDILTDEFYAQLKGKGQRATSALFLAKYQIYTAENKGSREDKKLQAYQWRVDALSKELTREQLAFVITEINNNLNNSSGYLGAISDRSKELYFNNETVGEYLWKQIAANPHTSLKNQVFYRQDYLDEFEQIWKTQSAFYPEILTDELKKELRDVVIFYQRKLKSQKSLVSFCEFENKEIEIKKEDGTSTKKVIGLKVAPKSSPLFQEFKIWQNLNNVLIRKKGSKTKKVAKNQQAVLFEEEKTISELDLEAKQALFNELNLKGNLKADYCLEILGYSPKEWEMNYSVLEGNRTNKALYEAYLKITDLEGYDAKNHLKVKLNKDEVELDDLKVPASEIKDMVQAIFKEAGINTDILHFNAELDGKDFENQASYQLWHLLYSYEGDDSKSGNELLYKLLETKFGFKKEYAQILANVSLSDDYGSLSTKAMRKIHPYIKENKFSTACELAGYRHSKHSLTKEENDNRVLKDSLEVLKKNSLRQPVVEKILNQMINLVNALLKKYRTENPNFKFDEIRIELARELKKNAEERANMTANINKAKTEHEKIIKILKNEFGLPNPTRNDIIRYRLYEELKANGYKDLYTNIKIPQEKLFTKEIDIEHIIPKSRVFDDSFSNKTLSFRKTNLDKGERTAFDYMESKFGADKLEEYVARVEDLYKNNIISKAKYQKLLKKESEIGDGFVERDLRETQYIAKKAKEILLQITPNVLSTSGGITDRLREDWDLINVMKELNLPKYRALGLTQMEDRKYGQQVEVITDWTKRNDHRHHAMDALTVAFTKHNHIQYLNYLNARKNEKHKEHSNIMGIQQLETIKVTDKNGNEKRVFKAPMPNFRQVTKAFLENILISHKAKNKVVTKNKNKVAGSNKVQEVLTPRGQLHKETVYGKYQYYVQKEEKIGAKFDLETIKKVANPLYQSLLKKRLEENGGDPKKAFTGKNSLAKNPIYLDDTQTEQLPEKVKLVWLENSFSIRKDITPENFKDEKLIDKILDEGVKRILKERLQSFGNDAKKAFSDLDKNPIWLNKEKGITIKRVTISGVANAEPLHTKKDHLGKEILDKEGKPIPVDFISTGSNHHVAVYRDEKGNLQEKVVSVFEAVVRANQGLPIIDKTYNQHLGWEFLFTMKQNEMFVFPNESTGFNPNDIDLLDPKNKRIISPNLFRVQKFSKLQYGNSFVREFVFRHHLETTVEDRKELQGITYKQMKNSTFFNDIIKVRINHLGDIVSIGEY

SEQ ID NO: 312 - protein, 1281 aa, Bifidobacterium bifidum
MEDDSQHDIREIYLAIHHMVKYRGNFLVEGTLESSNAFKEDELLKLLGRITRYEMSEGEQNSDIEQDDENKLVAPANGQLADALCATRGSRSMRVDNALEALSAVNDLSREQRAIVKAIFAGLEGNKLDLAKIFVSKEFSSENKKILGIYFNKSDYEEKCVQIVDSGLLDDEEREFLDRMQGQYNAIALKQLLGRSTSVSDSKCASYDAHRANWNLIKLQLRTKENEKDINENYGILVGWKIDSGQRKSVRGESAYENMRKKANVFFKKMIETSDLSETDKNRLIHDIEEDKLFPIQRDSDNGVIPHQLHQNELKQIIKKQGKYYPFLLDAFEKDGKQINKIEGLLAFRVPYFVGPLVVPEDLQKSDNSENHWMVRKKKGEITPWNFDEMVDKDASGRKFIERLVGTDSYLLGEPTLPKNSLLYQEYEVLNELNNVRLSVRTGNHWNDKRRMRLGREEKTLLCQRLFMKGQTVTKRTAENLLRKEYGRTYELSGLSDESKFTSSLSTYGKMCRIFGEKYVNEHRDLMEKIVELQTVFEDKETLLHQLRQLEGISEADCALLVNTHYTGWGRLSRKLLTTKAGECKISDDFAPRKHSIIEIMRAEDRNLMEIITDKQLGFSDWIEQENLGAENGSSLMEVVDDLRVSPKVKRGIIQSIRLIDDISKAVGKRPSRIFLELADDIQPSGRTISRKSRLQDLYRNANLGKEFKGIADELNACSDKDLQDDRLFLYYTQLGKDMYTGEELDLDRLSSAYDIDHIIPQAVTQNDSIDNRVLVARAENARKTDSFTYMPQIADRMRNFWQILLDNGLISRVKFERLTRQNEFSEREKERFVQRSLVETRQIMKNVATLMRQRYGNSAAVIGLNAELTKEMHRYLGFSHKNRDINDYHHAQDALCVGIAGQFAANRGFFADGEVSDGAQNSYNQYLRDYLRGYREKLSAEDRKQGRAFGFIVGSMRSQDEQKRVNPRTGEVVWSEEDKDYLRKVMNYRKMLVTQKVGDDFGALYDETRYAATDPKGIKGIPFDGAKQDTSLYGGFSSAKPAYAVLIESKGKTRLVNVTMQEYSLLGDRPSDDELRKVLAKKKSEYAKANILLRHVPKMQLIRYGGGLMVIKSAGELNNAQQLWLPYEEYCYFDDLSQGKGSLEKDDLKKLLDSILGSVQCLYPWHRFTEEELADLHVAFDKLPEDEKKNVITGIVSALHADAKTANLSIVGMTGSWRRMNNKSGYTFSDEDEFIFQSPSGLFEKRVTVGELKRKAKKEVNSKYRTNEKRLPTLSGASQP

SEQ ID NO: 313 - protein, 1121 aa, Bifidobacterium dentium
MSVGLAAIEVDETGFPIRILNIQSVIHDGGIDPQLGKKKSISRKAISGVARRTRRMRRRKVVRLRQLDATLESLGFPIVEPDSLDTWEIWLTRAKLASSYIQDDETRKEDVSIALRHIARHRGWRNPYSNVESLFVDVAPSEQYEELRRKAEEKLGTSLSGNPTSAEIVECILKRQVGEVQLRTRSRKGVNGNAVEKEGLLPTKLMQSDNAAEIRRIFKVQRIDDETGRKLLRAVFKACSPKGSVERRVGRDALAPGLPRALKASLAFQEYRIANVLTNLVISEDGTKRKLTIAEKQRVFGFLSSNETDDITWIDVAEKLGLERRQIQGVGCLTADGEERISSTPPRNITALHIHSAKPVIREKLVAWWKAASPTVRETMVELLSNTVDIDRVREDMDYSSAVAFIDSLGDEELTALDSVDLLSGRAAYSRQTLKQLTERMLNTDDDLHEARKAVFGVDDNWKPPVDAISTSVGNPAVDRVLKIVNRYLLACQKRWRNPQSVQIEHVRESFSSVAKAKETERVQGERARYRNDLRRELCEQEGLNKIRESDIRRWESVQRQNGTCLYCGSPITFRTCEMDHIVPRKGVGSTNTRVNLAAACAACNKLKSNTAFSVWARTEGAANRKVSQRDAIERVKTFIFNKSVPPREQRAFKQAVISRLRQAESDPAIDNRSIESVAWMADELHRRIEAYFNQDADVSGNTPATQVWVFQGRVTALARKASGIEGRIHFAGEWKKTRLDRRHHAVDAAVIAMMNHSAAQTLVERDSLRLSQWITRKPETWKNYPFSEGQKKTRFKEWLDCMNALLDLLNDALDSDRVPVTRCQRMSLGNSQAHAATIRKMKRVELFSPMDADLIRRASTPALYCALTRLPEYSPEKGLPENRGREIVLNGRHIRSTETVDFFASGAAQLMVRNGSAEIGDSIHHMRIYRYRKTGAKSQEYVYGMIRVFQIDLLHASSENLFAVQLPSQSVSVRYGDKNVVQAIQEGRAEYLGHIVPNDEILISYEGVRMKDSEKIGAYANDFSGTASELAQRRHWVVVGSDVSKLALRPSYLSEEGLENSGSESERLSKQTRKVIEGKGWVVAVNILAKYHPVVIRRNALGEPRFRTNSGMPVSWRWDR

SEQ ID NO: 314 - protein, 354 aa, Bifidobacterium longum
AKQYVNSASIDDAEAETMKTTVSVFQGRVTASARRAAGIEGKIHFIGQQSKTRLDRRHHAVDASVIAMMNTAAAQTLMERESLRESQRLIGLMPGERSWKEYPYEGTSRYESFHLWLDNMDVLLELLNDALDNDRIAVMQSQRYVLGNSIAHDATIHPLEKVPLGSAMSADLIRRASTPALWCALTRLPDYDEKEGLPEDSHREIRVHDTRYSADDEMGFFASQAAQIAVQEGSADIGSAIHHARVYRCWKTNAKGVRKYFYGMIRVFQTDLLRACHDDLFTVPLPPQSISMRYGEPRVVQALQSGNAQYLGSLVVGDEIEMDFSSLDVDGQIGEYLQFFSQFSGGNLAWKHWV

SEQ ID NO: 315 - protein, 1124 aa, Bifidobacterium longum
LTGHSGHTFWPTSSSPPIQLEQEKRPLPQRNTSQNGHTFWPITRERCFMRGKRYRIGIDVGLNSVGLAAVEVSDENSPVRLLNAQSVIHDGGVDPQKNKEAITRKNMSGVARRTRRMRRRKRERLHKLDMLLGKFGYPVIEPESLDKPFEEWHVRAELATRYIEDDELRRESISIALRHMARHRGWRNPYRQVDSLISDNPYSKQYGELKEKAKAYNDDATAAEEESTPAQLVVAMLDAGYAEAPRLRWRTGSKKPDAEGYLPVRLMQEDNANELKQIFRVQRVPADEWKPLFRSVFYAVSPKGSAEQRVGQDPLAPEQARALKASLAFQEYRIANVITNLRIKDASAELRKLTVDEKQSIYDQLVSPSSEDITWSDLCDFLGFKRSQLKGVGSLTEDGEERISSRPPRLTSVQRIYESDNKIRKPLVAWWKSASDNEHEAMIRLLSNTVDIDKVREDVAYASAIEFIDGLDDDALTKLDSVDLPSGRAAYSVETLQKLTRQMLTTDDDLHEARKTLFNVTDSWRPPADPIGEPLGNPSVDRVLKNVNRYLMNCQQRWGNPVSVNIEHVRSSFSSVAFARKDKREYEKNNEKRSIFRSSLSEQLRADEQMEKVRESDLRRLEAIQRQNGQCLYCGRTITFRTCEMDHIVPRKGVGSTNTRTNFAAVCAECNRMKSNTPFAIWARSEDAQTRGVSLAEAKKRVTMFTFNPKSYAPREVKAFKQAVIARLQQTEDDAAIDNRSIESVAWMADELHRRIDWYFNAKQYVNSASIDDAEAETMKTTVSVFQGRVTASARRAAGIEGKIHFIGQQSKTRLDRRHHAVDASVIAMMNTAAAQTLMERESLRESQRLIGLMPGERSWKEYPYEGTSRYESFHLWLDNMDVLLELLNDALDNDRIAVMQSQRYVLGNSIAHDATIHPLEKVPLGSAMSADLIRRASTPALWCALTRLPDYDEKEGLPEDSHREIRVHDTRYSADDEMGFFASQAAQIAVQEGSADIGSAIHHARVYRCWKTNAKGVRKYFYGMIRVFQTDLLRACHDDLFTVPLPPQSISMRYGEPRVVQALQSGNAQYLGSLVVGDEIEMDFPVSMLMVRLASIYNSSRSLVEGTLHGNIGLLMDSLTRRS

SEQ ID NO: 316 - protein, 166 aa, Bifidobacterium longum
MGLAAVEVSDENSPVRLLNAQSVIHDGGVDPQKNKEAITRKNMSGVARRTRRMRRRKRERLHKLDMLLGKFGYPVIEPESLDKPFEEWHVRAELATRYIEDDELRRESISIALRHMARHRGWRNPYRQVDSLISDNPYSKQYGELKEKAKAYNDDATAAEEESTPA

SEQ ID NO: 317 - protein, 1138 aa, Bifidobacterium longum
MNSVGLAAVEVSDENSPVRLLNAQSVIHDGGVDPQKNKEAITRKNMSGVARRTRRMRRRKRERLHKLDMLLGKFGYPVIEPESLDKPFEEWHVRAELATRYIEDDELRRESISIALRHMARHRGWRNPYRQVDSLISDNPYSKQYGELKEKAKAYNDDATAAEEESTPAQLVVAMLDAGYAEAPRLRWRTGSKKPDAEGYLPVRLMQEDNANELKQIFRVQRVPADEWKPLFRSVFYAVSPKGSAEQRVGQDPLAPEQARALKASLAFQEYRIANVITNLRIKDASAELRKLTVDEKQSIYDQLVSPSSEDITWSDLCDFLGFKRSQLKGVGSLTEDGEERISSRPPRLTSVQRIYESDNKIRKPLVAWWKSASDNEHEAMIRLLSNTVDIDKVREDVAYASAIEFIDGLDDDALTKLDSVDLPSGRAAYSVETLQKLTRQMLTTDDDLHEARKTLFNVTDSWRPPADPIGEPLGNPSVDRVLKNVNRYLMNCQQRWGNPVSVNIEHVRSSFSSVAFARKDKREYEKNNEKRSIFRSSLSEQLRADEQMEKVRESDLRRLEAIQRQNGQCLYCGRTITFRTCEMDHIVPRKGVGSTNTRTNFAAVCAECNRMKSNTPFAIWARSEDAQTRGVSLAEAKKRVTMFTFNPKSYAPREVKAFKQAVIARLQQTEDDAAIDNRSIESVAWMADELHRRIDWYFNAKQYVNSASIDDAEAETMKTTVSVFQGRVTASARRAAGIEGKIHFIGQQSKTRLDRRHHAVDASVIAMMNTAAAQTLMERESLRESQRLIGLMPGERSWKEYPYEGTSRYESFHLWLDNMDVLLELLNDALDNDRIAVMQSQRYVLGNSIAHDATIHPLEKVPLGSAMSADLIRRASTPALWCALTRLPDYDEKEGLPEDSHREIRVHDTRYSADDEMGFFASQAAQIAVQEGSADIGSAIHHARVYRCWKTNAKGVRKYFYGMIRVFQTDLLRACHDDLFTVPLPPQSISMRYGEPRVVQALQSGNAQYLGSLVVGDEIEMDFSSLDVDGQIGEYLQFFSQFSGGNLAWKHWVVDGFFNQTQLRIRPRYLAAEGLAKAFSDDVVPDGVQKIVTKQGWLPPVNTASKTAVRIVRRNAFGEPRLSSAHHMPCSWQWRHE

SEQ ID NO: 318 - protein, 182 aa, Bifidobacterium longum
MRGKRYRIGIDVGLNSVGLAAVEVSDENSPVRLLNAQSVIHDGGVDPQKNKEAITRKNMSGVARRTRRMRRRKRERLHKLDMLLGKFGYPVIEPESLDKPFEEWHVRAELATRYIEDDELRRESISIALRHMARHRGWRNPYRQVDSLISDNPYSKQYGELKEKAKAYNDDATAAEEESTPA

SEQ ID NO: 319 - protein, 441 aa, Bifidobacterium longum
MVAMLDAGYAEAPRLRWRTGSKKPDAEGYLPVRLMQEDNANELKQIFRVQRVPADEWKPLFRSVFYAVSPKGSAEQRVGQDPLAPEQARALKASLAFQEYRIANVITNLRIKDASAELRKLTVDEKQSIYDQLVSPSSEDITWSDLCDFLGFKRSQLKGVGSLTEDGEERISSRPPRLTSVQRIYESDNKIRKPLVAWWKSASDNEHEAMIRLLSNTVDIDKVREDVAYASAIEFIDGLDDDALTKLDSVDLPSGRAAYSVETLQKLTRQMLTTDDDLHEARKTLFNVTDSWRPPADPIGEPLGNPSVDRVLKNVNRYLMNCQQRWGNPVSVNIEHVRSSFSSVAFARKDKREYEKNNEKRSIFRSSLSEQLRADEQMEKVRESDLRRLEAIQRQNGQCLYCGRTITFRTCEMDHIVPRKGVGSTNTRTNFAAVCAECNRM

SEQ ID NO: 320 - protein, 967 aa, Bifidobacterium longum
MVAMLDAGYAEAPRLRWRTGSKKPDAEGYLPVRLMQEDNANELKQIFRVQRVPADEWKPLFRSVFYAVSPKGSAEQRVGQDPLAPEQARALKASLAFQEYRIANVITNLRIKDASAELRKLTVDEKQSIYDQLVSPSSEDITWSDLCDFLGFKRSQLKGVGSLTEDGEERISSRPPRLTSVQRIYESDNKIRKPLVAWWKSASDNEHEAMIRLLSNTVDIDKVREDVAYASAIEFIDGLDDDALTKLDSVDLPSGRAAYSVETLQKLTRQMLTTDDDLHEARKTLFNVTDSWRPPADPIGEPLGNPSVDRVLKNVNRYLMNCQQRWGNPVSVNIEHVRSSFSSVAFARKDKREYEKNNEKRSIFRSSLSEQLRADEQMEKVRESDLRRLEAIQRQNGQCLYCGRTITFRTCEMDHIVPRKGVGSTNTRTNFAAVCAECNRMKSNTPFAIWARSEDAQTRGVSLAEAKKRVTMFTFNPKSYAPREVKAFKQAVIARLQQTEDDAAIDNRSIESVAWMADELHRRIDWYFNAKQYVNSASIDDAEAETMKTTVSVFQGRVTASARRAAGIEGKIHFIGQQSKTRLDRRHHAVDASVIAMMNTAAAQTLMERESLRESQRLIGLMPGERSWKEYPYEGTSRYESFHLWLDNMDVLLELLNDALDNDRIAVMQSQRYVLGNSIAHDATIHPLEKVPLGSAMSADLIRRASTPALWCALTRLPDYDEKEGLPEDSHREIRVHDTRYSADDEMGFFASQAAQIAVQEGSADIGSAIHHARVYRCWKTNAKGVRKYFYGMIRVFQTDLLRACHDDLFTVPLPPQSISMRYGEPRVVQALQSGNAQYLGSLVVGDEIEMDFSSLDVDGQIGEYLQFFSQFSGGNLAWKHWVVDGFFNQTQLRIRPRYLAAEGLAKAFSDDVVPDGVQKIVTKQGWLPPVNTASKTAVRIVRRNAFGEPRLSSAHHMPCSWQWRHE

SEQ ID NO: 321 - protein, 1151 aa, Bifidobacterium sp.
MRGKRYRIGIDVGLNSVGLAAVEVSDENSPVRLLNAQSVIHDGGVDPQKNKEAITRKNMSGVARRTRRMRRRKRERLHKLDMLLGKFGYPVIEPESLDKPFEEWHVRAELATRYIEDDELRRESISIALRHMARHRGWRNPYRQVDSLISDNPYSKQYGELKEKAKAYNDDATAAEEESTPAQLVVAMLDAGYAEAPRLRWRTGSKKPDAEGYLPVRLMQEDNANELKQIFRVQRVPADEWKPLFRSVFYAVSPKGSAEQRVGQDPLAPEQARALKASLAFQEYRIANVITNLRIKDASAELRKLTVDEKQSIYDQLVSPSSEDITWSDLCDFLGFKRSQLKGVGSLTEDGEERISSRPPRLTSVQRIYESDNKIRKPLVAWWKSASDNEHEAMIRLLSNTVDIDKVREDVAYASAIEFIDGLDDDALTKLDSVDLPSGRAAYSVETLQKLTRQMLTTDDDLHEARKTLFNVTDSWRPPADPIGEPLGNPSVDRVLKNVNRYLMNCQQRWGNPVSVNIEHVRSSFSSVAFARKDKREYEKNNEKRSIFRSSLSEQLRADEQMEKVRESDLRRLEAIQRQNGQCLYCGRTITFRTCEMDHIVPRKGVGSTNTRTNFAAVCAECNRMKSNTPFAIWARSEDAQTRGVSLAEAKKRVTMFTFNPKSYAPREVKAFKQAVIARLQQTEDDAAIDNRSIESVAWMADELHRRIDWYFNAKQYVNSASIDDAEAETMKTTVSVFQGRVTASARRAAGIEGKIHFIGQQSKTRLDRRHHAVDASVIAMMNTAAAQTLMERESLRESQRLIGLMPGERSWKEYPYEGTSRYESFHLWLDNMDVLLELLNDALDNDRIAVMQSQRYVLGNSIAHDATIHPLEKVPLGSAMSADLIRRASTPALWCALTRLPDYDEKEGLPEDSHREIRVHDTRYSADDEMGFFASQAAQIAVQEGSADIGSAIHHARVYRCWKTNAKGVRKYFYGMIRVFQTDLLRACHDDLFTVPLPPQSISMRYGEPRVVQALQSGNAQYLGSLVVGDEIEMDFSSLDVDGQIGEYLQFFSQFSGGNLAWKHWVVDGFFNQTQLRIRPRYLAAEGLAKAFSDDVVPDGVQKIVTKQGWLPPVNTASKTAVRIVRRNAFGEPRLSSAHHMPCSWQWRHE

SEQ ID NO: 322 - protein, 1092 aa, Brevibacillus laterosporus
MAYTMGIDVGIASCGWAIVDLERQRIIDIGVRTFEKAENPKNGEALAVPRREARSSRRRLRRKKHRIERLKYMFVRNGLAVDIQHLEQTLRSQNEIDVWQLRVDGLDRMLTQKEWLRVLIHLAQRRGFQSNRKTDGSSEDGQVLVNVTENDRLMEEKDYRTVAEMMVKDEKFSDHKRNKNGNYHGVVSRASLLVEIHTLFESQRQHHNFLASKDFELEYINIWSSQRPVATKDQIEKMIGTCTFLPKEKRAPKASWHFQYFMLLQTINHIRITNAQGTRPLNKEEIEQVVNMALTKSKVSYHDIRKVLDLSEEYQFVGLDYGKEDEKKKVESKETIIKLDDYHKLNKIFNEVELAKGETWEAVDYDTVAYALTFFKDDEDIRDYLQNKYKDSKNRLVKNVANKEYTNELIEKVSTLSFRKVGHLSLKALRKIIPFLEQGMTYDKACQAAGFNFQGISKKKRSVVLPVIDQISNPVVNRALTQTRKVINALIKKYGSPETIHIETARELSKRFDERKNITKDYKENRDKNERAKKHLSELGIINPTGLDIVKYKLWCEQQGRCMYSNQPISFERLRESGYTEVDHIIPYSRSMNDSYNNRVLVMTRENREKSNQTPYEYMGNDTQRWDEFEQRVTTNPQIKKEKRQNLLLKGFTNRRELEMLERNLNDTRHITKYLSHFISTNLEFSPSDKKKKVVNTSGRITSHLRSRWGLEKNREQNDLHHAMDAVVIAVTSDSFIQQVTNYYKRKERRELNGDDKFPLPWKFFREEVIARLSPNPKEQIEALPNHFYSEDELADLQPIFVSRMPKRSITGEAHQAQFRRVVGKTKEGKNITAKKTALVDISYDKNGDFNMYGRETDPATYEAIKERYLEFGGNAKKAFSTDLHKPKKDGTKGPLIKSVRIMENKTLVHPVNKGKGVVYNSSIVRTDVFQRKEKYYLLPVYVTDVTKGKLPNKVIAAKKGYDDWIEVDDSFTFLYSLYPNDLIFIRQNPKKKISLKKRIESHSISDSKEVQEILTYYKGVDSSTAAIEFITHDGSYYAKGVGVQNLDCFEKYQVDILGNYSKVKGEKRLELETSDNNHKGKDVNSIKSTSR

SEQ ID NO: 323 - protein, 103 aa, Butyrivibrio fibrisolvens
MISVGQSRKDLEDLGYEFKLSFYKEDIIEYEKNGDILVERFLSRTMPQVRNYIETKPIDRPKYDKRNPVGLSKTSSIRKITMDILGNRFYVDKMSFNNVVGTQ

SEQ ID NO: 324 - protein, 177 aa, Butyrivibrio fibrisolvens
MLIAFSQMGYDAYHELTNKYIDFETGEIIDKEGFNELLNNDLVYKNTMYESKWLKIKGNIEKAAEKNKYWYQVNKKCNRGLCNQTVYGTRESDGDVYKISKIDIRTDDGFKKFKNIVDKGNESVFLMYENDPKTFELIMDIYKNYSDSKNPFVQYEKETGDIIRKYSKKITGQRFLN

SEQ ID NO: 325 - protein, 1442 aa, Caenispirillum salinarum
MPVLSPLSPNAAQGRRRWSLALDIGEGSIGWAVAEVDAEGRVLQLTGTGVTLFPSAWSNENGTYVAHGAADRAVRGQQQRHDSRRRRLAGLARLCAPVLERSPEDLKDLTRTPPKADPRAIFFLRADAARRPLDGPELFRVLHHMAAHRGIRLAELQEVDPPPESDADDAAPAATEDEDGTRRAAADERAFRRLMAEHMHRHGTQPTCGEIMAGRLRETPAGAQPVTRARDGLRVGGGVAVPTRALIEQEFDAIRAIQAPRHPDLPWDSLRRLVLDQAPIAVPPATPCLFLEELRRRGETFQGRTITREAIDRGLTVDPLIQALRIRETVGNLRLHERITEPDGRQRYVPRAMPELGLSHGELTAPERDTLVRALMHDPDGLAAKDGRIPYTRLRKLIGYDNSPVCFAQERDTSGGGITVNPTDPLMARWIDGWVDLPLKARSLYVRDVVARGADSAALARLLAEGAHGVPPVAAAAVPAATAAILESDIMQPGRYSVCPWAAEAILDAWANAPTEGFYDVTRGLFGFAPGEIVLEDLRRARGALLAHLPRTMAAARTPNRAAQQRGPLPAYESVIPSQLITSLRRAHKGRAADWSAADPEERNPFLRTWTGNAATDHILNQVRKTANEVITKYGNRRGWDPLPSRITVELAREAKHGVIRRNEIAKENRENEGRRKKESAALDTFCQDNTVSWQAGGLPKERAALRLRLAQRQEFFCPYCAERPKLRATDLFSPAETEIDHVIERRMGGDGPDNLVLAHKDCNNAKGKKTPHEHAGDLLDSPALAALWQGWRKENADRLKGKGHKARTPREDKDFMDRVGWRFEEDARAKAEENQERRGRRMLHDTARATRLARLYLAAAVMPEDPAEIGAPPVETPPSPEDPTGYTAIYRTISRVQPVNGSVTHMLRQRLLQRDKNRDYQTHHAEDACLLLLAGPAVVQAFNTEAAQHGADAPDDRPVDLMPTSDAYHQQRRARALGRVPLATVDAALADIVMPESDRQDPETGRVHWRLTRAGRGLKRRIDDLTRNCVILSRPRRPSETGTPGALHNATHYGRREITVDGRTDTVVTQRMNARDLVALLDNAKIVPAARLDAAAPGDTILKEICTEIADRHDRVVDPEGTHARRWISARLAALVPAHAEAVARDIAELADLDALADADRTPEQEARRSALRQSPYLGRAISAKKADGRARAREQEILTRALLDPHWGPRGLRHLIMREARAPSLVRIRANKTDAFGRPVPDAAVWVKTDGNAVSQLWRLTSVVTDDGRRIPLPKPIEKRIEISNLEYARLNGLDEGAGVTGNNAPPRPLRQDIDRLTPLWRDHGTAPGGYLGTAVGELEDKARSALRGKAMRQTLTDAGITAEAGWRLDSEGAVCDLEVAKGDTVKKDGKTYKVGVITQGIFGMPVDAAGSAPRTPEDCEKFEEQYGIKPWKAKGIPLA

SEQ ID NO: 326 - protein, 984 aa, Campylobacter coli
MARILAFDIGISSIGWAFSENDELKDCGVRIFTKAENPKTGESLALPRRLARSARKCLARRKARLNHLKHLIANEFKLNYEDYQSFDESLAKAYKGSLISPYELRFRALNELLSKQDFARVILHIAKRRGYDDIKNNGDEEKSEILKAIKQNEEKLVNYQSVGEYLYKEYFQKFKENSKEFINVRNKKESYERCIAQSFLKDELKLIFQKQREFGFSFSKKFEEEVLSVAFYKRALKDFSHLVGNCSFFTDEKRAPKNSPLAFMFVALTRIINLLNNLKNTEGILYTKDDLNALLNEVLKNGTLTYKQTKKLLGLSDDYEFKGEKGTYFIEFKKYKEFIKALGEHNLSQDDLNEIAKDITLIKDEIKLKKALAKYDLNQNQIDSLSKLEFKDHLNISFKALKLITPLMLEGKKYDEACNELNLKVAINEDKKDFLPAFNETYYKDEVTNPVVLRAIKEYRKVLNALLKKYGKVHKINIELAREVGKNHSQRAKIEKEQNENYKAKKDAELECEKLGLKINSKNILKLRLFKEQKEFCAYSGEKIKISDLQDEKMLEIDHIYPYSRSFDDSYMNKVLVFTKQNQEKLNQTPFEAFGNDSAKWQKIEVLAKNLPTKKQKRILDKNYKDKEQKNFKDRNLNDTRYIARLVLNYTKDYLDFLPLSDDENTKLNDTQKGSKVHVEAKSGMLTSALRHTWGFSAKDRNNHLHHAIDAVIIAYANNSIVKAFSDFKKEQESNSAELYAKKISELDYKNKRKFFEPFSGFRQKVLDKIDEIFVSKPERKKPSGALHEETFRKEEEFYQSYGGKEGVLKALELGKIRKVNGKIVKNGDMFRVDIFKHKKTNKFYAVPIYTMDFALKVLPNKAVARSKKGEIKDWILMDENYEFCFSLYKDSLILIQTKDMQEPEFVYYNAFTSSTVSLIVSKHDNKFETLSKNQKILFKNANEKEVIAKSIGIQNLKVFEKYIVSALGEVTKAEFRQREDFKK

SEQ ID NO: 327 - protein, 984 aa, Campylobacter coli
MARILAFDIGISSIGWAFSENDELKDCGVRIFTKAENPKTGESLALPRRLARSARKRLARRKARLNHLKHLIANEFKLNYEDYQSFDESLAKAYKGSLISPYELRFRALNELLSKQDFARVILHIAKRRGYDDIKNNGDEEKGKILKAIKQNEEKLVNYQSVGEYLYKEYFQKFKENSKEFINVRNKKESYERCITQSFLKYELKLIFQKQREFGFSFSKKFEEEVLSVAFYKRALKDFSHLVGNCSFFSDEKRAPKNSPLAFMFVALTRIINLLNNLKNTEGILYTKDDLNALLNEVLKNGTLTYKQTKKLLGLSDDYEFKGEKGTYFIEFKKYKEFIKALGEHNLSQDDLNEIAKDITLIKDEIKLKKALAKYDLNQNQIDSLSKLEFKDHLNISFKALKLITPLMLEGKKYDEACNELNLKVAINEDKKDFLPAFNETYYKDEVTNPVVLRAIKEYRKVLNALLKKYGKVHKINIELAREVGKNYSQRAKIEKEQNENYKAKKDAELECEKLGLKINSKNILKLRLFKEQKEFCAYSGEKIKISDLQDEKMLEIDHIYPYSRSFDDSYMNKVLVFTKQNQEKLNQTPFEAFGNDSAKWQKIEVLAKNLPTKKQKRILDKNYKDKEQKNFKDRNLNDTRYIARLVLNYTKDYLDFLPLSDDENTKLNDTQKGSKVHVEAKSGMLTSALRHTWGFSAKDRNNHLHHAIDAVIIAYANNSIVKAFSDFKKEQESNSAELYAKKISELDYKNKRKFFEPFSGFRQKVLDKIDEIFVSKPERKKPSGALHEETFRKEEEFYQSYGGKEGVLKALELGKIRKVNGKIVKNGDMFRVDIFKHKKTNKFYAVPIYTMDFALKVLPNKAVARSKKGEIKDWILMDENYEFCFSLYKDSLILIQTKDMQEPEFVYYNAFTSSTVSLIVSKHDNKFETLSKNQKILFKNANEKEVIAKSIGIQNLKVFEKYIVSALGEVTKAEFRQREDFKK

SEQ ID NO: 328 - protein, 984 aa, Campylobacter coli
MARILAFDIGISSIGWAFSENDELKDCGVRIFTKAENPKTGESLALPRRLARSARKRLARRKARLNHLKHLIANEFKLNYEDYQSFDESLAKAYKGSLISPYELRFRALNELLSKQDFARVILHIAKRRGYDDIKNNGDEEKSEILKAIKQNEEKLVNYQSVGEYLYKEYFQKFKENSKEFINVRNKKESYERCIAQSFLKDELKLIFQKQREFGFSFSKKFEEEVLSVAFYKRALKDFSHLVGNCSFFTDEKRAPKNSPLAFMFVALTRIINLLNNLKNTEGILYTKDDLNTLLNEVLKNGTLTYKQTKKLLGLSDDYEFKGEKGTYFIEFKKYKEFIKALGEHNLSQDNLNEIAKDITLIKDEIKLKKALAKYDLNQNQIDSLSKLEFKDHLNISFKALKLITPLMLEGKKYDEAYNELNLKVAINEDKKDFLPAFNETYYKDEVTNPVVLRAIKEYRKVLNALLKKYGKVHKINIELAREVGKNHSQRAKIEKEQNENYKAKKDAELECEKLGLKINSKNILKLRLFKEQKEFCAYSGEKIKISDLQDEKMLEIDHIYPYSRSFDDSYMNKVLVFTKQNQEKLNQTPFEAFGNDSAKWQKIEVLAKNLPTKKQKRILDKNYKDKEQKDFKDRNLNDTRYIARLVLNYTKDYLDFLPLSDDENTKLNDTQKGSKVHVEAKSGMLTSALRHTWGFSAKDRNNHLHHAIDAVIIAYANNSIVKAFSDFKKEQESNSAELYAKKISELDYKNKRKFFEPFSGFRQKVLDKIDEIFVSKPERKKPSGALHEETFRKEEEFYQSYGGKEGVLKALELGKIRKVNGKIVKNGDMFRVDIFKHKKTNKFYAVPIYTMDFALKVLPNKAVARSKKGEIKDWILMDENYEFCFSLYKDSLILIQTKDMQEPELVYFNAFTSSTVSLIVSKHDNKFETLSKNQKILFKNANEKEVIAKSIGIQNLKVFEKYIVSALGEVTKAEFRQREDFKK

SEQ ID NO: 329 - protein, 984 aa, Campylobacter coli
MARILAFDIGISSIGWAFSENDELKDCGVRIFTKAENPKTGESLALPRRLARSARKRLARRKARLNHLKHLIANEFKLNYEDYQSFDESLAKAYKGSLISPYELRFRALNELLSKQDFARVILHIAKRRGYDDIKNNGDEEKSEILKAIKQNEEKLVNYQSVGEYLYKEYFQKFKENSKEFINVRNKKESYERCIAQSFLKDELKLIFQKQREFGFSFSKKFEEEVLSVAFYKRALKDFSHLVGNCSFFTDEKRAPKNSPLAFMFVALTRIINLLNNLKNTEGILYTKDDLNALLNEVLKNGTLTYKQTKKLLGLSDDYEFKGEKGTYFIEFKKYKEFIKALGEHNLSQDDLNEIAKDITLIKDEIKLKKALAKYDLNQNQIDSLSKLEFKDHLNISFKALKLITPLMLEGKKYDEACNELNLKVAINEDKKDFLPAFNETYYKDEVTNPVVLRAIKEYRKVLNALLKKYGKVHKINIELAREVGKNYSQRAKIEKEQNENYKAKKDAELECEKLGLKINSKNILKLRLFKEQKEFCAYSGEKIKISDLQDEKMLEIDHIYPYSRSFDDSYMNKVLVFTKQNQEKLNQTPFEAFGNDSAKWQKIEVLAKNLPTKKQKRILDKNYKDKEQKNFKDRNLNDTRYIARLVLNYTKDYLDFLPLSDDENTKLNDTQKGSKVHVEAKSGMLTSALRHTWGFSAKDRNNHLHHAIDAVIIAYANNSIVKAFSDFKKEQESNSAELYAKKISELDYKNKRKFFEPFSGFRQKVLDKIDEIFVSKPERKKPSGALHEETFRKEEEFYQSYGGKEGVLKALELGKIRKVNGKIVKNGDMFRVDIFKHKKTNKFYAVPIYTMDFALKVLPNKAVARSKKGEIKDWILMDENYEFCFSLYKDSLILIQTKDMQEPEFVYYNAFTSSTVSLIVSKHDNKFETLSKNQKILFKNANEKEVIAKSIGIQNLKVFEKYIVSALGEVTKAEFRQREDFKK

SEQ ID NO: 330 - protein, 987 aa, Campylobacter coli
MARILAFDIGISSIGWAFSENDELKDCGVRIFTKAENPKTGESLALPRRLARSARKRLARRKARLNHLKHLIANEFKLNYEDYQSFDESLAKAYKGSLISPYELRFRALNELLSKQDFARVILHIAKRRGYDDIKNNGDEEKSEILKAIKQNEEKLVNYQSVGEYLYKEYFQKFKENSKEFINVRNKKESYERCIAQSFLKDELKLIFQKQREFGFSFSKKFEEEVLSVAFYKRALKDFSHLVGNCSFFTDEKRAPKNSPLAFMFVALTRIINLLNNLKNTEGILYTKDDLNTLLNEVLKNGTLTYKQTKKLLGLSDDYEFKGEKGTYFIEFKKYKEFIKALGEHNLSQDNLNEIAKDITLIKDEIKLKKALAKYDLNQNQIDSLSKLEFKDHLNISFKALKLITPLMLEGKKYDEAYNELNLKVAINEDKKDFLPAFNETYYKDEVTNPVVLRAIKEYRKVLNALLKKYGKVHKINIELAREVGKNHSQRAKIEKEQNENYKAKKDAELECEKLGLKINSKNILKLRLFKEQKEFCAYSGEKIKISDLQDEKMLEIDHIYPYSRSFDDSYMNKVLVFTKQNQEKLNQTPFEAFGNDSAKWQKIEVLAKNLPTKKQKRILDKNYKDKEQKDFKDRNLNDTRYIARLVLNYTKDYLDFLPLSDDENTKLNDTQKGSKVHVEAKSGMLTSALRHTWGFSAKDRNNHLHHAIDAVIIAYANNSIVKAFSDFKKEQESNSAELYAKKISELDYKNKRKFFEPFSGFRQKVLDKIDEIFVSKPERKKPSGALHEETFRKEEEFYQSYGGKEGVLKALELGKIRKVNGKIVKNGDMFRVDIFKHKKTNKFYAVPIYTMDFALKVLPNKAVARSKKGEIKDWILMDENYEFCFSLYKDSLILIQTKDMQEPELVYFNAFTSSTVSLIVSKHDNKFETLSKNQKILFKNANEKEVIAKSIGIQNLKVFEKYIVSALGEVTKAEFRQREDFKNELR

SEQ ID NO: 331 - protein, 984 aa, Campylobacter coli
MARILAFDIGISSIGWAFSENDELKDCGVRIFTKAENPKTGESLALPRRLARSARKRLARRKARLNHLKHLIANEFKLNYEDYQSFDESLAKAYKGSLISPYELRFRALNELLSKQDFARVILHIAKRRGYDDIKNNGDEEKSEILKAIKQNEEKLVNYQSVGEYLYKEYFQKFKENSKEFINVRNKKESYERCIAQSFLKDELKLIFQKQREFGFSFSKKFEEEVLSVAFYKRALKDFSHLVGNCSFFTDEKRAPKNSPLAFMFVALTRIINLLNNLKNTEGILYTKDDLNTLLNEVLKNGTLTYKQTKKLLGLSDDYEFKGEKGTYFIEFKKYKEFIKALGEHNLSQDNLNEIAKDITLIKDEIKLKKALAKYDLNQNQIDSLSKLEFKDHLNISFKALKLITPLMLEGKKYDEAYNELNLKVAINEDKKDFLPAFNETYYKDEVTNPVVLRAIKEYRKVLNALLKKYGKVHKINIELAREVGKNHSQRAKIEKEQNENYKAKKDAELECEKLGLKINSKNILKLRLFKEQKEFCAYSGEKIKISDLQDEKMLEIDHIYPYSRSFDDSYMNKVLVFTKQNQEKLNQTPFEAFGNDSAKWQKIEVLAKNLPTKKQKRILDKNYKDKEQKDFKDRNLNDTRYIARLVLNYTKDYLDFLPLSNDENTKLNDTQKGSKVHVEAKSGMLTSALRHTWGFSAKDRNNHLHHAIDAVIIAYANNSIVKAFSDFKKEQESNSAELYAKKISELDYKNKRKFFEPFSGFRQKVLDKIDEIFVSKPERKKPSGALHEETFRKEEEFYQSYGGKEGVLKALELGKIRKVNGKIVKNGDMFRVDIFKHKKTNKFYAVPIYTMDFALKVLPNKAVARSKKGEIKDWILMDENYEFCFSLYKDSLILIQTKDMQEPELVYFNAFTSSTVSLIVSKHDNKFETLSKNQKILFKNANEKEVIAKSIGIQNLKVFEKYIVSALGEVTKAEFRQREDFKK

SEQ ID NO: 332 - protein, 987 aa, Campylobacter coli
MARILAFDIGISSIGWAFSENDELKDCGVRIFTKAENPKTGESLALPRRLARSARKRLARRKARLNHLKHLIANEFKLNYEDYQSFDESLAKAYKGSLISPYELRFRALNELLSKQDFARVILHIAKRRGYDDIKNSDDKEKGAILKAIKQNEEKLANYQSVGEYLYKEYFQKFKENSKEFTNVRNKKESYERCIAQSFLKDELKLIFKKQREFGFSFSKKFEEEVLSVAFYKRALKDFSHLVGNCSFFTDEKRAPKNSPLAFMFVALTRIINLLNNLKNTEGILYTKDDLNALLNEVLKNGTLTYKQTKKLLGLSDDYEFKGEKGTYFIEFKKYKEFIKALGDHSLSQDDLNEIAKDITLIKDEIKLKKALAKYDLNQNQIDSLSKLEFKDHLNISFKALKLITPLMLEGKKYDEACNELNLKVAINEDKKDFLPAFNETYYKDEVTNPVVLRAIKEYRKVLNALLKKYGKVHKINIELAREVGKNYSQRAKIEKEQNENYKAKKDAELECEKLGLKINSKNILKLRLFKEQKEFCAYSGEKIKISDLQDEKMLEIDHIYPYSRSFDDSYMNKVLVFTKQNQEKLNKTPFEAFGNDSTKWQKIEVLAKNLPEKKQKRILDKNYKDKEQKDFKDRNLNDTRYIARLVLNYTKDYLDFLPLSDDENTKLNDTQKGSKVHVEAKSGMLTSALRHTWGFSTKDRNNHLHHAIDAVIIAYANNSIVKAFSDFKKEQESNSAELYAKKISELDYKNKRKFFEPFSGFRQKVLDKIDEIFVSKPERKKPSGALHEETFRKEEEFYQSYGGKEGVLKALELGKIRKVNGKIVKNGDMFRVDIFKHKKTNKFYAVPIYTMDFALKVLPNKAVARSKKGEIKDWILMDENYEFCFSLYKDSLILIQTKDMQEPEFVYYNAFTSSTVSLIVSKHDNKFETLSKNQKILFKNANEKEVIAKSIGIQNLKVFEKYIVSALGEVTKAEFRQREDFKNELR

SEQ ID NO: 333 - protein, 984 aa, Campylobacter coli
MARILAFDIGISSIGWAFSENDELKDCGVRIFTKAENPKTGESLALPRRLARSARKRLARRKARLNHLKHLIANEFKLNYEDYQSFDESLAKAYKGSLISPYELRFRALNELLSKQDFARVILHIAKRRGYDDIKNSDDKEKGAILKAIKQNEEKLTNYQSVGEYLYKEYFQKFKENSKEFTNVRNKKESYERCIAQSFLKDELKLIFKKQREFGFSFSKKFEEEVLSVAFYKRALKDFSHLVGNCSFFTDEKRAPKNSPLAFMFVALTRIINLLNNLKNTEGILYTKDDLNALLNEVLKNGTLTYKQTKKLLGLSDDYEFKGEKGTYFIEFKKYKEFIKALGDHSLSQDDLNEIAKDITLIKDEIKLKKALAKYDLNQNQIDSLSKLEFKDHLNISFKALKLITPLMLEGKKYDEACNELNLKVAINEDKKDFLPAFNETYYKDEVTNPVVLRAIKEYRKVLNALLKKYGKVHKINIELAREVGKNYSQRAKIEKEQNENYKAKKDAELECEKLGLKINSKNILKLRLFKEQKEFCAYSGEKIKISDLQDEKMLEIDHIYPYSRSFDDSYMNKVLVFTKQNQEKLNQTPFEAFGNDSAKWQKIEVLAKNLPTKKQKRILDKNYKDKEQKDFKDRNLNDTRYIARLVLNYTKDYLDFLPLSDDENTKLNDTQKGSKVHVEAKSGMLTSALRHTWGFSAKDRNNHLHHAIDAVIIAYANNSIVKAFSDFKKEQESNSAELYAKKISELDYKNKRKFFEPFSGFRQKVLDKIDEIFVSKPERKKPSGALHEETFRKEEEFYQSYGGKEGVLKALELGKIRKVNGKIVKNGDMFRVDIFKHKKTNKFYAVPIYTMDFALKVLPNKAVARSKKGEIKDWILMDENYEFCFSLYKDSLILIQTKDMQEPEFVYYNAFTSSTVSLIVSKHDNKFETLSKNQKILFKNANEKEVIAKSIGIQNLKVFEKYIVSALGEVTKAEFRQREDFKK

SEQ ID NO: 334 - protein, 965 aa, Campylobacter coli
MKIIGFNLGIANIGWALRENDEIIDCGVRVFDIPENPKNGNSLALERRENKARMKIVKRKKARMLATKTFLKKELNVDLSKLFLIGSTQSIYELRTKALSSLISKEELSAIILHIAKHRGYDDSALKNENGTIIEALNKNKEAMLKFKSVGEYFYKNFVQNKEVKKIRNTTEDYSNSVPRSLLKQELDLILDKQKELGLIKNADFKAKLFEIIFFKRPLKDFSNKIGNCIFFENEKRAAKNTISACEFVALGKVVNLLKSIEKDIGIVYEKDSINEIMSIILDKTSISYKKIRDILNLPQDINFKGLDYSKNNVENSKLVDLKKLNEFKKALGDGFTNLDKDILDSIATDITLTKDTATLKEKLKNYNVLNAEQIEKLSELVFNDHINLSLKALKQIIPLMYEGKRYDEACELCNFTIAKNQEKNEYLPLFEKTRFAKDISSPVVIRAICEFRKLLNDIIRRYGSVHKIHLELTRDFGISFNDRKKIIKEIEQNEQSRIKALETIKELKLEETSKNIQIVRLFEDQKGICPYSGLKMDLKCLDELVIDYIRPYNRSLDDSYSNKVLTFKKLNDLKQGKTPFEAFGEDEKLWAEINERIKEYNGKKRFKIFDKFFKDKKPFDFTEQTLQDTRWLTKLVASYLNEYLSFLPISEDENTALGYGEKGSKQHVILSSGMITQMLRNFWYLGFKNHKDYKNNAMDAIIVAFTTNSIIFTFNNFKKELDLAKAEFYANKISESDYLLKRKFLPPFSGFKEQALEKVKNIFVSHSLKIKNKGTLHELTPLKIKELKNTYGDLDLAVKLGKIRKYNDKYYANAKGSLVRTDLFADKENKFHAVSIYKADFSTKKLPNKTPATTSNGETKEGIEMNENYNFCMSLYKNTPISVKIKGMKEPIICYYHGFNTSGSKITYKKHDNNYHNLSEDEMVVFRKNDKESIVVGKILEIKKYSISPSGELSLIENEERKWF

SEQ ID NO: 335 - protein, 965 aa, Campylobacter coli
MKIIGFNLGIANIGWALRENDEIIDCGVRVFDIPENPKNGNSLALERRENKARMKIVKRKKARMLATKTFLKKELNVDLSKLFLIGSTQSIYELRTKALSSLISKEELSAIILHIAKHRGYDDSALKNENGTIIEALNKNKEAMLKFKSVGEYFYKNFVQNKEVKKIRNTTEDYSNSVPRSLLKQELDLILDKQKELGLIKNADFKAKLFEIIFFKRPLKDFSNKIGNCIFFENEKRAAKNTISACEFVALGKVVNLLKSIEKDIGIVYEKDSINEIMSIILDKTSISYKKIRDILNLPQDINFKGLDYSKNNAENSKLVDLKKLNEFKKALGDGFANLDKDILDSIATDITLTKDTATLKEKLKNYNVLNAEQIEKLSELVFNDHINLSLKALKQIIPLMYEGKRYDEACELCNFTIAKNQEKNEYLPLFEKTRFAKDISSPVVIRAICEFRKLLNDIIRRYGSVHKIHLELTRDFGISFNDRKKIIKEIEQNEQSRIKALETIKELKLEETSKNIQIVRLFEDQKGICPYSGLKMDLKCLDELVIDYIRPYNRSLDDSYSNKVLTFKKLNDLKQGKTPFEAFGEDEKLWAEINERIKEYNGKKRFKIFDKFFKDKKPFDFTEQTLQDTRWLTKLVASYLNEYLSFLPISEDENTALGYGEKGSKQHVVLSSGMITQMLRNFWYLGFKNHKNYKNNAMDAIIVAFTTNSIIFAFNNFKKELDLAKAEFYANKISESDYLLKRKFLPPFSGFKEQALEKVKNIFVSHSLKIKNKGTLHELTPLKIKELKNTYGDLDLAVKLGKIRKYNDKYYANTKGSLVRTDLFVDKENKFHAVSIYKADFSTKKLPNKTPATTSNGETKEGIEMNENYNFCMSLYKNTPVSVKIKGMKEPIICYYHGFNTSGSKITYKKHDNNYHNLSEDEMVVFRKNDKESIVVGKILEIKKYSISPSGELSLIENEKRKWF

SEQ ID NO: 336 - protein, 965 aa, Campylobacter coli
MKIIGFNLGIANIGWALRENDEIIDCGVRVFDIPENPKNGNSLALERRENKARMKIVKRKKARMLATKTFLKKELNVDLSKLFLIGSTQSIYELRTKALSSLISKEELSAIILHIAKHRGYDDSALKNENGTIIEALNKNKEAMLKFKSVGEYFYKNFVQNKEVKKIRNTTEDYSNSVPRSLLKQELDLILDKQKELGLIKNADFKEKLFEIIFFKRPLKDFSNKIGNCIFFENEKRAAKNTISACEFVALGKVVNLLKSIEKDIGIVYEKDSINEIMSIILDKTSISYKKIRDILNLPQDINFKGLDYSKNNAENSKLVDLKKLNEFKKALGDGFANLDKDILDSIATDITLTKDTATLKEKLKNYNVLNAEQIEKLSELVFNDHINLSLKALKQIIPLMYEGKRYDEACELCNFTIAKNQEKNEYLPLFEKTRFAKDISSPVVIRAICEFRKLLNDIIRRYGSVHKIHLELTRDFGISFNDRKKIIKEIEQNEQSRIKALETIKELKLEETSKNIQIVRLFEDQKGICPYSGLKMDLKCLDELVIDYIRPYNRSLDDSYSNKILTFKKLNDLKQGKTPFEAFGEDEKLWAEINERIKEYNGKKRFKIFDKFFKDKKPFDFTEQTLQDTRWLTKLVASYLNEYLLFLPINEDENTALGYGEKGSKQHVVLSSGMITQMLRNFWYLGFKNHKDYKNNAMDAIIVAFTTNSIIFAFNNFKKELDLAKAEFYANKISESDYLLKRKFLPPFSGFKEQALEKVKNIFVSHSLKIKNKGTLHELTPLKIKELKNTYGDLDLAVKLGKIRKYNDKYYANAKGSLVRTDLFADKENKFHAVSIYKADFSTKKLPNKTPATTSNGETKEGIEMNENYNFCMSLYKNTPISVKIKGMKEPIICYYHGFNTSGSKITYKKHDNNYHNLSEDEMVVFRKNDKESIVVGKILEIKKYSISPSGELSLIENEERKWF

SEQ ID NO: 337 - protein, 933 aa, Campylobacter coli
MKIIGFNLGIANIGWALRENDEIIDCGVRVFDIPENPKNGNSLALERRENKARMKIVKRKKARMLATKTFLKKELNVDLSKLFLIGSTQSIYELRTKALSSLISKEELSVIILHIAKHRGYDDSALKNENGTIIEALNKNKETMLKFKSVGEYFYKNFVQNKEVKKIRNTTEDYSNSVPRSLLKQELDLILDRQKELGLIKNADFKAKLFEIIFFKRPLKDFSNKIGNCIFFENEKRAAKNTISACEFVALGKVVNLLKSIEKDIGIVYEKDSINEIMSIILDKTSISYKKIRDILNLPQDINFKGLDYSKNNVENSKLVDLKKLNEFKKALGDGFTNLDKDILDSIATDITLTKDTATLKEKLKNYNVLNAEQIEKLSELVFNDHINLSLKALKQIIPLMYEGKRYDEACELCNFTIAKNQEKNEYLPLFEKTRFAKDISSPVVIRAICEFRKLLNDIIRRYGSVHKIHLELTRDFGISFNDRKKIIKEIEQNEQSRIKALETIKELKLEETSKNIQIVRLFEDQKGICPYSGLKMDLKCLDELVIDYIRPYNRSLDDSYSNKVLTFKKLNDLKQGKTPFEAFGEDEKLWAEINERIKEYNGKKRFKIFDKFFKDKKPFDFTEQTLQDTRWLTKLVASYLNEHLSFLPISEDENTALGYGEKGSKQHVILSSGMITQMLRNFWYLGFKNHKDYKNNAMDAIIVAFTTNSIIFTFNNFKKELDLAKAEFYANKISESDYLLKRKFLPPFSGFKEQALEKVKNIFVSHSLKIKNKGTLHELTPLKIKELKNTYGDLDLAVKLGKIRKYNDKYYANANGSLVRSDLFIDKKNKFHAVPIYKADFSTKKLPNKTPATTSNGETKEGIEMNENYNFCMSLYKNTPISVKIKGMKESIICYYHGFNTSGSKITYKKHDNNYHNLSEDEMVVFRKNDKE

SEQ ID NO: 338 - protein, 666 aa, Campylobacter jejuni
KGEKGTYFIEFKKYKEFIKALDEHSLSQDDLNEIAKDITLIKDEIKLKKALAKYDLKENQIDSLSKLEFKDHLNISFKALKLITPLMLEGKKYDEACNELNLKVAINEDKKDFLPAFNETYYKDEVTNPVVLRAIKEYRKILNALLKKYGKVHKINIELAREVGKNHSQRAKIEKEQNENYKAKKDAELECEKLGLKINSKNILKLRLFKEQKEFCVYSGEKIKLSDLQDEKMLEIDHIYPYSRSFDDSYMNKVLVFAKQNQEKLNKTPFEAFGNDSTKWQKIEVLTKNLPTKKQKRILDKNYKDKEQKDFKDRNLNDTRYIARLVLNYTKDYLDFLPLSDDENTKLNDTQKGSKVHVEAKSGMLTSALRHTWGFSTKDRNNHLHHAIDAAIIAYANNSIVKAFSDFKKEQESNSAELYAKKISELDYKNKRKFFEPFSGFRQKVLDKIDEIFVSKPERKKPSGALHEETFRKEEEFYQSYGGKEGVLKALELGKIRKVNGKIVKNGDMFRVDIFKHKKTNKFYAVPIYTMDFALKVLPNKAVARSKKGEIKDWILMDEDYEFCFSLYKDSLILIQTKDMQEPELVYFNAFTSSTVSLIVSKHDNKFETLSKNQKILFKNANEKEVIAKSIGIQNLKVFEKYIVSALGEVTKAEFRQREDFKNELR

SEQ ID NO: 339 - protein, 190 aa, Campylobacter jejuni
MAFDIGISSIGWAFSENDELKDCGVRIFTKVENPKTGESLALPRRLARSARKRLARRKARLNHLKHLIANEFKLNYEDYQSFDESLAKAYKGSLISPYELRFRALNELLSKQDFARVILHIAKRRGYDDIKNSDDKEKGAILKAIKQNEEKLANYQSVGEYLYKEYFQKFKENSKEFTNVRNKKKVMNAA

SEQ ID NO: 340 - protein, 985 aa, Campylobacter jejuni
MAKILAFDIGISSIGWAFVENDELKDCGVRIFTKAENPKTGESLALPRRLARSARKRLARRKARLNHLKHLIANEFKLNYEDYQSFDESLAKAYKGTLISPYELRFKALNELLSKQDLARVILHIAKRRGYDNIKNSDDKEKGAILKAVKENEEKLANYKSVGEYLYKEYFQKFKENSKEFINVRNKKESYERCIAQSFLKDELKLIFQKQREFGFNFSKKFEEEVLSVAFYKRALKDFSHLVGNCSFFVDEKRAPKNSPLAFEFVALTRIVNLLNNLNKNNSYIKDDLNALLSEVLKNGTLTYKQTKKILGLSDDYEFKGQKGNYFIEFKKYKEFIKALCEHNLNQDDLNEIAKDITLVKDETKLKKALAKYDLNQNQIENLSKIEFKDHLNISFKALKLIVPLMREGKKYDEVCNELNLKTAINEDKKEFLPAFNETYYKDEVNNPVVLRAIKEYRKVLNSLLKKYGKVHKINIELAREVGKNHRERSKIEKEQNENFKAKKDAELECEKLGLKINSKNILKLRLFKEQKEFCVYSGEKIKISDLQDEKMLEIDHIYPYSRSFDDSYMNKVLVFTKQNQEKLNKTPFEAFGKDDVKWQKIETLAKNLPAKKQKRILDKNYKDKEQKDFKDRNLNDTRYIARLVLNYTKDYLEFLPLSDDENIKLNDTQKGSKVHVEAKSGMLTSVLRHTWGFSTKDRNNHLHHAIDAVIIAYANASVVKAFSDFKKEQENYTAELYAKKINELDFKNKRKFFEPFSNFRQKVLEKIDEIFVSKPERKKPSGALHEETFYKEEEFYKEYGGKEGVLKALELGKIRKVNGKIVSNANMFRVDIFKYKKTNKFYAVPIYTMDFALGILPNKAVVGGKDKQGIIKDWLLMDENYEFCFSLYKDSLILLQTKDMQEPELVYFKSFKSSTAGLVVSKHDNKFENLNENQKKLFKSANEKKVVAEGIGIQNLKVFEKYIVSALGEITKAEIKERENFKKK

SEQ ID NO: 341 - protein, 987 aa, Campylobacter jejuni
MARILAFDIGISSIGWAFSENDELKDCGVRIFTKAENPKTGESLALPRCLARSARKRLARRKARLNHLKHLIANEFKLNYEDYQSFDESLAKAYKGSLISPYELRFRALNELLSKQDFARVILHIAKRRGYDDIKNNGDEEKGEILKAIKQNEEKLVSYQSVGEYLYKEYFQKFKENSKEFINVRNKKESYERCIAQSFLKDELKLIFQKQRKFGFSFSKKFEEEVLSVAFYKRALKDFSHLVGNCSFFTDEKRAPKNSPLAFMFVALTRIINLLNNLKNTEGILYTKDDLNTLLNEVLKNGTLTYKQTKKLLGLSNDYEFKGEKGTYFIEFQKYKEFVKALGEHNLSQDDLNEIAKDITLIKDEIKLKKALAKYDLNQNQIDSLSKLEFKDHLNISFKALKLITPLMLEGKKYDEACNELNLKVAINEDKKDFLPAFNETYYKDEVTNPVVLRAIKEYRKVLNALLKKYGKVHKINIELAREVGKNHSQRAKIEKEQNENYKAKKDAELECEKLGLKINSKNILKLRLFKEQKEFCVYSGEKIKISDLQDEKMLEIDHIYPYSRSFDDSYMNKVLVFTKQNQEKLNKTPFETFGNDRVKWQKIEVLAKNLPTKKQKRILDKNYKDKEQKDFKDRNLNDTRYIARLVLNYTKDYLDFLPLSDDENTKLNDTQKGSKVHVEAKSGMLTSTLRHTWGFSTKDRNNHLHHAIDAAIIAYANNSIVKAFSDFKKEQESNTAELYAKKISELDYKNKRKFFEPFSGFRQKLLDKIDEIFVSKPERKKPSGALHEETFRKEEEFYQSYGGKEGVLKALELGKIRKVNGKIVSNGDMFRVDIFKHKKTNKFYAVPIYTMDFALKVLPNKAVVQGKDKKSGLIKDWILMDENYEFCFSLYKDSLILIQTKDMQEPELVYYERLDSSNASLTVSKHDNKFETLSKNQKILFKNANEKEVIAKSIGIQNLKVFEKYIVSALGEVTKAEFRQREDFKK

SEQ ID NO: 342 - protein, 987 aa, Campylobacter jejuni
MARILAFDIGISSIGWAFSENDELKDCGVRIFTKAENPKTGESLALPRRLARSARKRLARRKARLNHLKHLIANEFKLNYEDYQSFDEGLAKAYKGSLISPYELRFRALNELLSKQDFARVILHIAKRRGYDDIKNNGDEEKSEILKAIKQNEEKLVNYQSVGEYLYKEYFQKFKENSKEFINVRNKKESYERCIAQSFLKDELKLIFQKQREFGFSFSKKFEEEVLSVAFYKRALKDFSHLVGNCSFFTDEKRAPKNSPLAFMFVALTRIINLLNNLKNTEGILYTKDDLNTLLNEVLKNGTLTYKQTKKLLGLSDDYEFKGEKGTYFIEFKKYKEFIKALGEHNLSQDNLNEIAKDITLIKDEIKLKKALAKYDLNQNQIDSLSKLEFKDHLNISFKALKLITPLMLEGKKYDEAYNELNLKVAINEDKKDFLPAFNETYYKDEVTNPVVLRAIKEYRKVLNALLKKYGKVHKINIELAREVGKNHSQRAKIEKEQNENYKAKKDAELECEKLGLKINSKNILKLRLFKEQKEFCAYSGEKIKISDLQDEKMLEIDHIYPYSRSFDDSYMNKVLVFTKQNQEKLNQTPFEAFGNDSAKWQKIEVLAKNLPTKKQKRILDKNYKDKEQKDFKDRNLNDTRYIARLVLNYTKDYLDFLPLSDDENTKLNDTQKGSKVHVEAKSGMLTSALRHTWGFSAKDRNNHLHHAIDAVIIAYANNSIVKAFSDFKKEQESNSAELYAKKISELDYKNKRKFFEPFSGFRQKVLDKIDEIFVSKPERKKPSGALHEETFRKEEEFYQSYGGKEGVLKALELGKIRKVNGKIVKNGDMFRVDIFKHKKTNKFYAVPIYTMDFALKVLPNKAVVQGKDKKSGLIKDWILMDENYEFCFSLYKDSLILIQTKDMQEPELVYFNAFTSSTVSLIVSKHDNKFETLSKNQKILFKNANEKEVIAKSIGIQNLKVFEKYIVSALGEVTKAEFRQREDFKK

SEQ ID NO: 343 - protein, 961 aa, Campylobacter jejuni
MARILAFDIGISSIGWAFSENDELKDCGVRIFTKAENPKTGESLALPRRLARSARKRLARRKARLNHLKHLIANEFKLNYEDYQSFDESLAKAYKGSLISPYELRFRALNELLSKQDFARVILHIAKRRGYDDIKNNGDEEKGKILKAIKQNEEKLVNYQSVGEYLYKEYFQKFKENSKEFINVRNKKESYERCITQSFLKYELKLIFQKQREFGFSFSKKFEEEVLSVAFYKRALKDFSHLVGNCSFFSDEKRAPKNSPLAFMFVALTRIINLLNNLKNTEGILYTKDDLNALLNEVLKNGTLTYKQTKKLLGLSDDYEFKGEKGTYFIEFKKYKEFIKALGEHNLSQDDLNEIAKDITLIKDEIKLKKALAKYDLNQNQIDSLSKLEFKDHLNIGFKALKLITPLMLEGKKYDEACNELNLKVAINEDKKDFLPAFNETYYKDEVTNPVVLRAIKEYRKVLNALLKKYGKVHKINIELAREVGKNHSQRAKIEKEQNENYKAKKDAELECEKLGLKINSKNILKLRLFKEQKEFCAYSGEKIKLSDLQDEKMLEIDHIYPYSRSFDDSYMNKVLVFTKQNQEKLNKTPFEAFGNDNVKWQKIEVLAKNLPEKKQKRILDKNYKDKEQKDFKDRNLNDTRYIARLVLNYTKDYLDFLPLSDDENTKLKGSKVHVEAKSGMLTSALRHTWGFSTKDRNNHLHHAIDAAIIAYANNSIVKDFSDFKKEQESNSAELYAKKISELDYKNKRKFFEPFSGFRQKVLDKIDEIFVSKPERKKPSGALHEETFRKEEEFYQSYGGKEGVLKALELGKIRKVNGKIVKNGDMFRVDIFKHKKTNKFYAVPIYTMDFALKVLPNKAVARSKKGEIKDWILMDENYEFCFSLYKDSLILIQTKDMQEPELVYFNAFTSSTVSLIVSKHDNKFETLSKNLKVFEKYIVSALGEVTKAEFRQREDFKNELR

SEQ ID NO: 344 - protein, 984 aa, Campylobacter jejuni
MARILAFDIGISSIGWAFSENDELKDCGVRIFTKAENPKTGESLALPRRLARSARKRLARRKARLNHLKHLIANEFKLNYEDYQSFDESLAKAYKGSLISPYELRFRALNELLSKQDFARVILHIAKRRGYDDIKNNGDEEKGKILKAIKQNEEKLVNYQSVGEYLYKEYFQKFKENSKEFINVRNKKESYERCITQSFLKYELKLIFQKQREFGFSFSKKFEEEVLSVAFYKRALKDFSHLVGNCSFFTDEKRAPKNSPLAFMFVALTRIINILNNLKNTEGILYTKDDLNALLNEVLKNGTLTYKQTKKLLGLSDDYEFKGEKGTYFIEFKKYKEFIKALGEHNLSQDDLNEIAKDITLIKDEIKLKKALAKYDLNQNQIDSLSKLEFKDHLNISFKALKLITPLMLEGKKYDEACNELNLKVAINEDKKDFLPAFNETYYKDEVTNPVVLRAIKEYRKILNALLKKYGKVHKINIELAREVGKNHSQRAKIEKEQNENYKAKKDAEIECEKLGLKINSKNILKLRLFKEQKEFCAYSGEKIKISDLQDEKMLEIDHIYPYSRSFDDSYMNKVLVFTKQNQEKLNQTPFEAFGNDSAKWQKIEVLAKNLPTKKQKRILDKNYKDKEQKDFKDRNLNDTRYIARLVLNYTKDYLDFLPLSDDENTKLNDTQKGSKVHVEAKSGMLTSALRHTWGFSAKDRNNHLHHAIDAVIIAYANNSIVKAFSDFKKEQESNSAELYAKKISELDYKNKRKFFEPFSGFRQKVLDKIDEIFVSKPERKKPSGALHEETFRKEEEFYQSYGGKEGVLKALELGKIRKVNGKIVKNGDMFRVDIFKHKKTNKFYAVPIYTMDFALKVLPNKAVARSKKGEIKDWILMDENYEFCFSLYKDSLILIQTKDMQEPEFVYYNAFTSSTVSLIVSKHDNKFETLSKNQKILFKNANEKEVIAKSIGIQNLKVFEKYIVSALGEVTKAEFRQREDFKK

SEQ ID NO: 345 - protein, 987 aa, Campylobacter jejuni
MARILAFDIGISSIGWAFSENDELKDCGVRIFTKAENPKTGESLALPRRLARSARKRLARRKARLNHLKHLIANEFKLNYEDYQSFDESLAKAYKGSLISPYELRFRALNELLSKQDFARVILHIAKRRGYDDIKNNGDEEKGKILKAIKQNEEKLVSYQSVGEYLYKEYFQKFKENSKEFINVRNKKESYERCIAQSFLKDELKLIFQKQREFGFSFSKKFEEEVLSVAFYKRALKDFSHLVGNCSFLLMKKERQKNSPLAFMFVALTRIINLLNNLKNTEGILYTKDDLNTLLNEALKNGTLTYKQTKKLLGLSNDYEFKGEKGTYFIEFQKYKEFVKALGEHNLSQDDLNEIAKDITLIKDEIKLKKALAKYDLNQNQIDSLSKLEFKDHLNISFKALKLITPLMLEGKKYDEACNELNLKVAINEDKKDFLPAFNETYYKDEVTNPVVLRAIKEYRKVLNALLKKYGKVHKINIELAREVGKNHSQRAKIEKEQNENYKAKKDAELECEKLGLKINSKNILKLRLFKEQKEFCVYSGEKIKISDLQDEKMLEIDHIYPYSRSFDDSYMNKVLVFTKQNQEKLNKTPFETFGNDRVKWQKIEVLAKNLPTKKQKRILDKNYKDKEQKDFKDRNLNDTRYIARLVLNYTKDYLDFLPLSDDENTKLNDTQKGSKVHVEAKSGMLTSTLRHTWGFSTKDRNNHLHHAIDAAIIAYANNSIVKAFSDFKKEQESNTAELYAKKISELDYKNKRKFFEPFSGFRQKLLDKIDEIFVSKPERKKPSGALHEETFRKEEEFYQSYGGKEGVLKALELGKIRKVNGKMVKNGDMFRVDIFKHKKTNKFYAVPIYTMDFALKVLPNKAVVQGKDKKSGLIKDWILMDENYEFCFSLYKDSLILIQTKDMQEPELVYYERLDSSNASLTVSKHDNKFETLSKNQKILFKNANEKEVIAKSIGIQNLKVFEKYIVSALGEVTKAEFRQREDFKK

SEQ ID NO: 346 - protein, 987 aa, Campylobacter jejuni
MARILAFDIGISSIGWAFSENDELKDCGVRIFTKAENPKTGESLALPRRLARSARKRLARRKARLNHLKHLIANEFKLNYEDYQSFDESLAKAYKGSLISPYELRFRALNELLSKQDFARVILHIAKRRGYDDIKNNGDEEKSEILKAIKQNEEKLVNYQSVGEYLYKEYFQKFKENSKEFINVRNKKESYERCIAQSFLKDELKLIFQKQREFGFSFSKKFEEEVLSVAFYKRALKDFSHLVGNCSFFTDEKRAPKNSPLAFMFVALTRIINLLNNLKNTEGILYTKDDLNTLLNEVLKNGTLTYKQTKKLLGLSDDYEFKGEKGTYFIEFKKYKEFIKALGEHNLSQDNLNEIAKDITLIKDEIKLKKALAKYDLNQNQIDSLSKLEFKDHLNISFKALKLITPLMLEGKKYDEAYNELNLKVAINEDKKDFLPAFNETYYKDEVTNPVVLRAIKEYRKVLNALLKKYGKVHKINIELAREVGKNHSQRAKIEKEQNENYKAKKDAELECEKLGLKINSKNILKLRLFKEQKEFCAYSGEKIKISDLQDEKMLEIDHIYPYSRSFDDSYMNKVLVFTKQNQEKLNQTPFEAFGNDSAKWQKIEVLAKNLPTKKQKRILDKNYKDKEQKDFKDRNLNDTRYIARLVLNYTKDYLDFLPLSDDENTKLNDTQKGSKVHVEAKSGMLTSALRHTWGFSAKDRNNHLHHAIDAVIIAYANNSIVKAFSDFKKEQESNSAELYAKKISELDYKNKRKFFEPFSGFRQKVLDKIDEIFVSKPERKKPSGALHEETFRKEEEFYQSYGGKEGVLKALELGKIRKVNGKIVKNGDMFRVDIFKHKKTNKFYPVPIYTMDFALKVLPNKAVVQGKDKKSGLIKDWILMDENYEFCFSLYKDSLILIQTKDMQEPELVYFNAFTSSTVSLIVSKHDNKFETLSKNQKILFKNANEKEVIAKSIGIQNLKVFEKYIVSALGEVTKAEFRQREDFKK

SEQ ID NO: 347 - protein, 987 aa, Campylobacter jejuni
MARILAFDIGISSIGWAFSENDELKDCGVRIFTKAENPKTGESLALPRRLARSARKRLARRKARLNHLKHLIANEFKLNYEDYQSFDESLAKAYKGSLISPYELRFRALNELLSKQDFARVILHIAKRRGYDDIKNNGDEEKSEILKAIKQNEEKLVNYQSVGEYLYKEYFQKFKENSKEFINVRNKKESYERCIAQSFLKDELKLIFQKQREFGFSFSKKFEEEVLSVAFYKRALKDFSHLVGNCSFFTDEKRAPKNSPLAFMFVALTRIINLLNNLKNTEGILYTKDDLNTLLNEVLKNGTLTYKQTKKLLGLSDDYEFKGEKGTYFIEFKKYKEFIKALGEHNLSQDNLNEIAKDITLIKDEIKLKKALAKYDLNQNQIDSLSKLEFKDHLNISFKALKLITPLMLEGKKYDEAYNELNLKVAINEDKKDFLPAFNETYYKDEVTNPVVLRAIKEYRKVLNALLKKYGKVHKINIELAREVGKNHSQRAKIEKEQNENYKAKKDAELECEKLGLKINSKNILKLRLFKEQKEFCAYSGEKIKISDLQDEKMLEIDHIYPYSRSFDDSYMNKVLVFTKQNQEKLNQTPFEAFGNDSAKWQKIEVLAKNLPTKKQKRILDKNYKDKEQKDFKDRNLNDTRYIARLVLNYTKDYLDFLPLSDDENTKLNDTQKGSKVHVEAKSGMLTSALRHTWGFSAKDRNNHLHHAIDAVIIAYANNSIVKAFSDFKKEQESNSAELYAKKISELDYKNKRKFFEPFSGFRQKVLDKIDEIFVSKPERKKPSGALHEETFRKEEEFHQSYGGKEGVLKALELGKIRKVNGKIVKNGDMFRVDIFKHKKTNKFYAVPIYTMDFALKVLPNKAVVQGKDKKSGLIKDWILMDENYEFCFSLYKDSLILIQTKDMQEPELVYFNAFTSSTVSLIVSKHDNKFETLSKNQKILFKNANEKEVIAKSIGIQNLKVFEKYIVSALGEVTKAEFRQREDFKK

SEQ ID NO: 348 - protein, 987 aa, Campylobacter jejuni
MARILAFDIGISSIGWAFSENDELKDCGVRIFTKAENPKTGESLALPRRLARSARKRLARRKARLNHLKHLIANEFKLNYEDYQSFDESLAKAYKGSLISPYELRFRALNELLSKQDFARVILHIAKRRGYDDIKNNGDEEKSEILKAIKQNEEKLVNYQSVGEYLYKEYFQKFKENSKEFINVRNKKESYERCIAQSFLKDELKLIFQKQREFGFSFSKKFEEEVLSVAFYKRALKDFSHLVGNCSFFTDEKRAPKNSPLAFMFVALTRIINLLNNLKNTEGILYTKDDLNTLLNEVLKNGTLTYKQTKKLLGLSDDYEFKGEKGTYFIEFKKYKEFIKALGEHNLSQDNLNEIAKDITLIKDEIKLKKALAKYDLNQNQIDSLSKLEFKDHLNISFKALKLITPLMLEGKKYDEAYNELNLKVAINEDKKDFLPAFNETYYKDEVTNPVVLRAIKEYRKVLNALLKKYGKVHKINIELAREVGKNHSQRAKIEKEQNENYKAKKDAELECEKLGLKINSKNILKLRLFKEQKEFCAYSGEKIKISDLQDEKMLEIDHIYPYSRSFDDSYMNKVLVFTKQNQEKLNQTPFEAFGNDSAKWQKIEVLAKNLPTKKQKRILDKNYKDKEQKDFKDRNLNDTRYIARLVLNYTKDYLDFLPLSDDENTKLNDTQKGSKVHVEAKSGMLTSALRHTWGFSAKDRNNHLHHAIDAVIIAYANNSIVKAFSDFKKEQESNSAELYAKKISELDYKNKRKFFEPFSGFRQKVLDKIDEIFVSKPERKKPSGALHEETFRKEEEFYQSYGGKEGVLKALELGKIRKVNGKIVKNGDMFRVDIFKHKKTNKFYAVPIYTMDFALKVLPNKAVVQGKDKKSGLIKDWILMDENYEFCFSLYKDSLILIQTKDMQEPELVYFNAFTSSTVSLIVSKHDNKFETLSKNQKILFKNANEKEVIAKSIGIQNLKVFEKYIVSALGEVTKAEFRQREDFKK

SEQ ID NO: 349 - protein, 861 aa, Campylobacter jejuni
MARILAFDIGISSIGWAFSENDELKDCGVRIFTKAENPKTGESLALPRRLARSARKRLARRKARLNHLKHLIANEFKLNYEDYQSFDESLAKAYKGSLISPYELRFRALNELLSKQDFARVILHIAKRRGYDDIKNNGDEEKSEILKAIKQNEEKLVNYQSVGEYLYKEYFQKFKENSKEFINVRNKKESYERCITQSFLKDELKLIFQKQREFGFSFSKKFEEEVLSVAFYKRALKDFSHLVGNCSFFTDEKRAPKNSPLAFMFVALTRIINILNNLKNTEGILYTKDDLNALLNEVLKNGTLTYKQTKKLLGLSDDYEFKGEKGTYFIEFKKYKEFIKALGEHNLSQDDLNEIAKDITLIKDEIKLKKALAKYDLNQNQIDSLSKLEFKDHLNISFKALKLITPLMLEGKKYDEACNELNLKVAINEDKKDFLPAFNETYYKDEVTNPVVLRAIKEYRKILNALLKKYGKVHKINIELAREVGKNHSQRAKIEKEQNENYKAKKDAEIECEKLGLKINSKNILKLRLFKEQKEFCAYSGEKIKLSDLQDEKMLEIDHIYPYSRSFDDSYMNKVLVFTKQNQEKLNKTPFEAFGNDSTKWQKIEVLAKNLPEKKQKRILDKNYKDKEQKDFKDRNLNDTRYIARLVLNYTKDYLDFLPLSDDENTKLNDTQKGSKVHVEAKSGMLTSALRHTWGFSAKDRNNHLHHAIDAAIIAYANNSIVKAFSDFKKEQESNSVELYAKKISELDYKNKRKFFEPFSGFRQKVLDKIDEIFVSKPERKKPSGALHEETFRKEEEFYQSYGGKEGVLKALELGKIRKVNGKIVKNGDMFRVDIFKHKKTNKFLCCANLYYGFCFKSITK

SEQ ID NO: 350 - protein, 462 aa, Campylobacter jejuni
MARILAFDIGISSIGWAFSENDELKDCGVRIFTKAENPKTGESLALPRRLARSARKRLARRKARLNHLKHLIANEFKLNYEDYQSFDESLAKAYKGSLISPYELRFRALNELLSKQDFARVILHIAKRRGYDDIKNNGDEEKSEILKAIKQNEEKLVNYQSVGEYLYKEYFQKFKENSKEFINVRNKKESYERCITQSFLKDELKLIFQKQREFGFSFSKKFEEEVLSVAFYKRALKDFSHLVGNCSFFTDEKRAPKNSPLAFMFVALTRIINILNNLKNTEGILYTKDDLNALLNEVLKNGTLTYKQTKKLLGLSDDYEFKGEKGTYFIEFKKYKEFIKALGEHNLSQDDLNEIAKDITLIKDEIKLKKALAKYDLNQNQIDSLSKLEFKDHLNISFKALKLITPLMLEGKKYDEACNELNLKVAINEDKKDFLPAFNETYYKDEVTNPVVLRAIKEYRKS

SEQ ID NO: 351 - protein, 984 aa, Campylobacter jejuni
MARILAFDIGISSIGWAFSENDELKDCGVRIFTKAENPKTGESLALPRRLARSARKRLARRKARLNHLKHLIANEFKLNYEDYQSFDESLAKAYKGSLISPYELRFRALNELLSKQDFARVILHIAKRRGYDDIKNNGDEEKSEILKAIKQNEEKLVNYQSVGEYLYKEYFQKFKENSKEFINVRNKKESYERCITQSFLKDELKLIFQKQREFGFSFSKKFEEEVLSVAFYKRALKDFSHLVGNCSFFTDEKRAPKNSPLAFMFVALTRIINLLNNLKNTEGILYTKDDLNALLNEVLKNGTLTYKQTKKLLGLSDDYEFKGEKGTYFIEFKKYKEFIKALDEHSLSQDDLNEIAKDITLIKDEIKLKKALAKYDLNQNQIDSLSKLEFKDHLNISFKALKLITPLMLEGKKYDEACNELNLKVAINEDKKDFLPAFNETYYKDEVTNPVVLRAIKEYRKILNALLKKYGKVHKINIELAREVGKNHSQRAKIEKEQNENYKAKKDAEIECEKLGLKINSKNILKLRLFKEQKEFCAYSGEKIKISDLQDEKMLEIDHIYPYSRSFDDSYMNKVLVFTKQNQEKLNKTPFEAFGNDGVKWQKIEVLAKNLPEKKQKRILDKNYKDKEQKDFKDRNLNDTRYIARLVLNYTKDYLDFLPLSDDENTKLNDTQKGSKVHVEAKSGMLTSALRHTWGFSTKDRNNHLHHAIDAAIIAYANNSIVKAFSDFKKEQESNSAELYAKKISELDYKNKRKFFEPFSGFRQKVLDKIDEIFVSKPERKKPSGALHEETFRKEEEFYQSYGGKEGVLKALELGKIRKVNGKIVKNGDMFRVDIFKHKKTNKFYAVPIYTMDFALKVLPNKAVARSKKGEIKDWILMDENYEFCFSLYKDSLILIQTKDMQEPELVYFNAFTSSTVSLVVSKHDNKFETLSKNQKILFKNANEKEVIAKSIGIQNLKVFEKYIVSALGEVTKAEFRQREDFKK

SEQ ID NO: 352 - protein, 984 aa, Campylobacter jejuni
MARILAFDIGISSIGWAFSENDELKDCGVRIFTKAENPKTGESLALPRRLARSARKRLARRKARLNHLKHLIANEFKLNYEDYQSFDESLAKAYKGSLISPYELRFRALNELLSKQDFARVILHIAKRRGYDDIKNSDDKEKGAILKAIKQNEEKLANYQSVGEYLYKEYFQKFKENSKEFTNVRNKKESYERCIAQSFLKDELKLIFKKQREFGFSFSKKFEEEVLSVAFYKRALKDFSHLVGNCSFFTDEKRAPKNSPLAFMFVALTRIINLLNNLKNTEGILYTKDDLNALLNEVLKNGTLTYKQTKKLLGLSDDYEFKGEKGTYFIEFKKYKEFIKALGDHSLSQDDLNEIAKDITLIKDEIKLKKALAKYDLNQNQIDSLSKLEFKDHLNISFKALKLITPLMLEGKKYDEACNELNLKVAINEDKKDFLPAFNETYYKDEVTNPVVLRAIKEYRKVLNALLKKYGKVHKINIELAREVGKNYSQRAKIEKEQNENYKAKKDAELECEKLGLKINSKNILKLRLFKEQKEFCAYSGEKIKISDLQDEKMLEIDHIYPYSRSFDDSYMNKVLVFTKQNQEKLNQTPFEAFGNDSAKWQKIEVLAKNLPTKKQKRILDKNYKDKEQKDFKDRNLNDTRYIARLVLNYTKDYLDFLPLSDDENTKLNDTQKGSKVHVEAKSGMLTSALRHTWGFSAKDRNNHLHHAIDAVIIAYANNSIVKAFSDFKKEQESNSAELYAKKISELDYKNKRKFFEPFSGFRQKVLDKIDEIFVSKPERKKPSGALHEETFRKEEEFYQSYGGKEGVLKALELGKIRKVNGKIVKNGDMFRVDIFKHKKTNKFYAVPIYTMDFALKVLPNKAVARSKKGEIKDWILMDENYEFCFSLYKDSLILIQTKDMQEPEFVYYNAFTSSTVSLIVSKHDNKFETLSKNQKILFKNANEKEVIAKSIGIQNLKVFEKYIVSALGEVTKAEFRQREDFKK

SEQ ID NO: 353 - protein, 984 aa, Campylobacter jejuni
MARILAFDIGISSIGWAFSENDELKDCGVRIFTKAENPKTGESLALPRRLARSARKRLARRKARLNHLKHLIANEFKLNYEDYQSFDESLAKAYKGSLISPYELRFRALNELLSKQDFARVILHIAKRRGYDDIKNSDDKEKGAILKAIKQNEEKLANYQSVGEYLYKEYFQKFKENSKEFTNVRNKKESYERCIAQSFLKDELKLIFKKQREFGFSFSKKFEEEVLSVAFYKRALKDFSHLVGNCSFFTDEKRAPKNSPLAFMFVALTRIINLLNNLKNTEGILYTKDDLNTLLNEVLKNGTLTYKQTKKLLGLSDDYEFKGEKGTYFIEFKKYKEFIKALGEHNLSQDDLNEIAKDITLIKDEIKLKKALAKYDLNQNQIDSLSKLEFKDHLNISFKALKLITPLMLEGKKYDEACNELNLKVAINEDKKDFLPAFNETYYKDEVTNPVVLRAIKEYRKVLNALLKKYGKVHKINIELAREVGKNYSQRAKIEKEQNENYKAKKDAELECEKLGLKINSKNILKLRLFKEQKEFCAYSGEKIKISDLQDEKMLEIDHIYPYSRSFDDSYMNKVLVFTKQNQEKLNKTPFEAFGNDSTKWQKIEVLAKNLPEKKQKRILDKNYKDKEQKDFKDRNLNDTRYIARLVLNYTKDYLDFLPLSDDENTKLNDTQKGLKVHVEAKSGMLTSALRHTWGFSAKDRNNHLHHAIDAVIIAYANNSIVKAFSDFKKEQESNSAELYAKKISELDYKNKRKFFEPFSGFRQKVLDKIDEIFVSKPERKKPSGALHEETFRKEEEFYQSYGGKEGVLKALELGKIRKVNGKIVKNGDMFRVDIFKHKKTNKFYAVPIYTMDFALKVLPNKAVARSKKGEIKDWILMDENYEFCFSLYKDSLILIQTKDMQEPEFVYYNAFTSSTVSLIVSKHDNKFETLSKNQKILFKNANEKEVIAKSIGIQNLKVFEKYIVSALGEVTKAEFRQREDFKK

SEQ ID NO: 354 - protein, 984 aa, Campylobacter jejuni
MARILAFDIGISSIGWAFSENDELKDCGVRIFTKAENPKTGESLALPRRLARSARKRLARRKARLNHLKHLIANEFKLNYEDYQSFDESLAKAYKGSLISPYELRFRALNELLSKQDFARVILHIAKRRGYDDIKNSDDKEKGAILKAIKQNEEKLANYQSVGEYLYKEYFQKFKENSKEFTNVRNKKESYERCIAQSFLKDELKLIFKKQREFGFSFSKKFEEEVLSVAFYKRALKDFSHLVGNCSFFTDEKRAPKNSPLAFMFVALTRIINLLNNLKNTEGILYTKDDLNALLNEVLKNGTLTYKQTKKLLGLSDDYEFKGEKGTYFIEFKKYKEFIKALGDHSLSQDDLNEIAKDITLIKDEIKLKKALAKYDLNQNQIDSLSKLEFKDHLNISFKALKLITPLMLEGKKYDEACNELNLKVAINEDKKDFLPAFNETYYKDEVTNPVVLRAIKEYRKVLNALLKKYGKVHKINIELAREVGKNYSQRAKIEKEQNENYKAKKDAELECEKLGLKINSKNILKLRLFKEQKEFCAYSGEKIKISDLQDEKMLEIDHIYPYSRSFDDSYMNKVLVFTKQNQEKLNQTPFEAFGNDSAKWQKIEVLAKNLPTKKQKRILDKNYKDKEQKNFKDRNLNDTRYIARLVLNYTKDYLDFLPLSDDENTKLNDTQKGSKVHVEAKSGMLTSALRHTWGFSAKDRNNHLHHTIDAVIIAYANNSIVKAFSDFKKEQESNSAELYAKKISELDYKNKRKFFEPFSGFRQKVLDKIDEIFVSKPERKKPSGALHEETFRKEEEFYQSYGGKEGVLKALELGKIRKVNGKIVKNGDMFRVDIFKHKKTNKFYAVPIYTMDFALKVLPNKAVARSKKGEIKDWILMDENYEFCFSLYKDSLILIQTKDMQEPEFVYYNAFTSSTVSLIVSKHDNKFETLSKNQKILFKNANEKEVIAKSIGIQNLKVFEKYIVSALGEVTKAEFRQREDFKK

SEQ ID NO: 355 - protein, 984 aa, Campylobacter jejuni
MARILAFDIGISSIGWAFSENDELKDCGVRIFTKAENPKTGESLALPRRLARSARKRLARRKARLNHLKHLIANEFKLNYEDYQSFDESLAKAYKGSLISPYELRFRALNELLSKQDFARVILHIAKRRGYDDIKNSDDKEKGAILKAIKQNEEKLANYQSVGEYLYKEYFQKFKENSKEFTNVRNKKESYERCIAQSFLKDELKLIFKKQREFGFSFSKKFEEEVLSVAFYKRALKDFSHLVGNCSFFTDEKRAPKNSPLAFMFVALTRIINLLNNLKNTEGILYTKDDLNTFLNEVLKNGTLTYKQTKKLLGLSDDYEFKGEKGTYFIEFKKYKEFIKALGDHNLSQDDLNEIAKDITLIKDEIKLKKALAKYDLNQNQIDSLSKLEFKDHLNISFKALKLITPLMLEGKKYDEACNELNLKVAINEDKKDFLPAFNETYYKDEVTNPVVLRAIKEYRKVLNALLKKYGKVHKINIELAREVGKNHSQRAKIEKEQNENYKAKKDAELECEKLGLKINSKNILKLRLFKEQKEFCAYSGEKIKISDLQDEKMLEIDHIYPYSRSFDDSYMNKVLVFTKQNQEKLNKTPFEAFGNDSAKWQKIEVLAKNLPTKKQKRILDKNYKDKEQKDFKDRNLNDTRYIARLVLNYTKDYLDFLPLSDDENTKLNDTQKGSKVHVEAKSGMLTSALRHTWGFSTKDRNNHLHHAIDAVIIAYANNSIVKAFSDFKKEQESNSAELYAKKISELDYKNKRKFFEPFSGFRQKVLDKIDEIFVSKPERKKPSGALHEETFRKEEEFYQSYGGKEGVLKALELGKIRKVNGKIVKNGDMFRVDIFKHKKTNKFYAVPIYTMDFALKVLPNKAVARSKKGEIKDWILMDENYEFCFSLYKDSLILIQTKDMQEPEFVYYNAFTSSTVSLIVSKHDNKFETLSKNQKILFKNANEKEVIAKSIGIQNLKVFEKYIVSALGEVTKAEFRQREDFKK

SEQ ID NO: 356 - protein, 987 aa, Campylobacter jejuni
MARILAFDIGISSIGWAFSENDELKDCGVRIFTKAENPKTGESLALPRRLARSARKRLARRKARLNHLKHLIANEFKLNYEDYQSFDESLAKAYKGSLISPYELRFRALNELLSKQDFARVILHIAKRRGYDDIKNSDDKEKGAILKAIKQNEEKLANYQSVGEYLYKEYFQKFKENSKEFTNVRNKKESYERCIAQSFLKDELKLIFKKQREFGFSFSKKFEEEVLSVAFYKRALKDFSHLVGNCSFFTDEKRAPKNSPLAFMFVALTRIINLLNNLKNTEGILYTKDDLNTLLNEVLKNGTLTYKQTKKLLGLSDDYEFKGEKGTYFIEFKKYKEFIKSLGDHSLSQDDLNEIAKDITLIKDEIKLKKALAKYDLNQNQIDSLSKLEFKDHLNISFKALKLITPLMLEGKKYDEACNELNLKVAINEDKKDFLPAFNETYYKDEVTNPVVLRAIKEYRKVLNALLKKYGKVHKINIELAREVGKNHSQRAKIEKEQNENYKAKKDAELECEKLGLKINSKNILKLRLFKEQKEFCAYSGEKIKISDLQDEKMLEIDHIYPYSRSFDDSYMNKVLVFTKQNQEKLNQTPFEAFGNDSAKWQKIEVLAKNLPTKKQKRILDKNYKDKEQKNFKDRNLNDTRYIARLVLNYTKDYLDFLPLSDDENTKLNDTQKGSKVHVEAKSGMLTSALRHTWGFSAKDRNNHLHHAIDAVIIAYANNSIVKAFSDFKKEQESNSAELYAKKISELDYKNKRKFFEPFSGFRQKVLDKIDEIFVSKPERKKPSGALHEETFRKEEEFYQSYGGKEGVLKALELGKIRKVNGKIVKNGDMFRVDIFKHKKTNKFYAVPIYTMDFALKVLPNKAVARSKKGEIKDWILMDENYEFCFSLYKDSLILIQTKDMQEPEFVYYNAFTSSTVSLIVSKHDNKFETLSKNQKILFKNANEKEVIAKSIGIQNLKVFEKYIVSALGEVTKAEFRQREDFKNELR

SEQ ID NO: 357 - protein, 987 aa, Campylobacter jejuni
MARILAFDIGISSIGWAFSENDELKDCGVRIFTKAENPKTGESLALPRRLARSARKRLARRKARLNHLKHLIANEFKLNYEDYQSFDESLAKAYKGSLISPYELRFRALNELLSKQDFARVILHIAKRRGYDDIKNSDDKEKGAILKAIKQNEEKLANYQSVGEYLYKEYFQKFKENSKEFTNVRNKKESYERCIAQSFLKDELKLIFKKQREFGFSFSKKFEEEVLSVAFYKRALKDFSHLVGNCSFFTDEKRAPKNSPLAFMFVALTRIINLLNNLKNTEGILYTKDDLNALLNEVLKNGTLTYKQTKKLLGLSDDYEFKGEKGTYFIEFKKYKEFIKALGDHSLSQDDLNEIAKDITLIKDEIKLKKALVKYDLNQNQIDSLSKLEFKDHLNISFKALKLITPLMLEGKKYDEACNELNLKVAINEDKKDFLPAFNETYYKDEVTNPVVLRAIKEYRKVLNALLKKYGKVHKINIELAREVGKNYSQRAKIEKEQNENYKAKKDAELECEKLGLKINSKNILKLRLFKEQKEFCAYSGEKIKISDLQDEKMLEIDHIYPYSRSFDDSYMNKVLVFTKQNQEKLNQTPFEAFGNDSAKWQKIEVLAKNLPTKKQKRILDKNYKDKEQKDFKDRNLNDTRYIARLVLNYTKDYLDFLPLSDDENTKLNDTQKGSKVHVEAKSGMLTSALRHTWGFSAKDRNNHLHHAIDAVIIAYANNSIVKAFSDFKKEQESNSAELYAKKISELDYKNKRKFFEPFSGFRQKVLDKIDEIFVSKPERKKPSGALHEETFRKEEEFYQSYGGKEGVLKALELGKIRKVNGKIVKNGDMFRVDIFKHKKTNKFYAVPIYTMDFALKVLPNKAVARSKKGEIKDWILMDENYEFCFSLYKDSLILIQTKDMQEPELVYFNAFTSSTVSLIVSKHDNKFETLSKNQKILFKNANEKEVIAKSIGIQNLKVFEKYIVSALGEVTKAEFRQREDFKNELR

SEQ ID NO: 358 - protein, 983 aa, Campylobacter jejuni; identical to SEQ ID NO: 236

SEQ ID NO: 359 - protein, 987 aa, Campylobacter jejuni
MARILAFDIGISSIGWAFSENDELKDCGVRIFTKAENPKTGESLALPRRLARSARKRLARRKARLNHLKHLIANEFKLNYEDYQSFDESLAKAYKGSLISPYELRFRALNELLSKQDFARVILHIAKRRGYDDIKNSDDKEKGAILKAIKQNEEKLVNYQSVGEYLYKEYFQKFKENSKEFTNVRNKKESYERCIAQSFLKDELKLIFKKQREFGFSFSKKFEEEVLSVAFYKRALKDFSHLVGNCSFFTDEKRAPKNSPLAFMFVALTRIINLLNNLKNTEGILYTKDDLNALLNEVLKNGTLTYKQTKKLLGLSDDYEFKGEKGTYFIEFKKYKEFIKALGDHSLSQDDLNEIAKDITLIKDEIKLKKALAKYDLNQNQIDSLSKLEFKDHLNISFKALKLITPLMLEGKKYDEACNELNLKVAINEDKKDFLPAFNETYYKDEVTNPVVLRAIKEYRKVLNALLKKYGKVHKINIELAREVGKNYSQRAKIEKEQNENYKAKKDAELECEKLGLKINSKNILKLRLFKEQKEFCAYSGEKIKISDLQDEKMLEIDHIYPYSRSFDDSYMNKVLVFTKQNQEKLNQTPFEAFGNDSAKWQKIEVLAKNLPTKKQKRILDKNYKDKEQKDFKDRNLNDTRYIARLVLNYTKDYLDFLPLSDDENTKLNDTQKGSKVHVEAKSGMLTSALRHTWGFSAKDRNNHLHHAIDAVIIAYANNSIVKAFSDFKKEQESNSAELYAKKISELDYKNKRKFFEPFSGFRQKVLDKIDEIFVSKPERKKPSGALHEETFRKEEEFYQSYGGKEGVLKALELGKIRKVNGKIVKNGDMFRVDIFKHKKTNKFYAVPIYTMDFALKVLPNKAVARSEKGEIKDWILMDENYEFCFSLYKDSLILIQTKDMQEPELVYFNAFTSSTVSLIVSKHDNKFETLSKNQKILFKNANEKEVIAKSIGIQNLKVFEKYIVSALGEVTKAEFRQREDFKNELR

SEQ ID NO: 360 - protein, 987 aa, Campylobacter jejuni
MARILAFDIGISSIGWAFSENDELKDCGVRIFTKAENPKTGESLALPRRLARSARKRLARRKARLNHLKHLIANEFKLNYEDYQSFDESLAKAYKGSLISPYELRFRALNELLSKQDFARVILHIAKRRGYDNIKNSDNEEKSEILKAIKQNEEKLVNYQSVGEYLYKEYFQKFKENSKEFINVRNKKESYERCIAQSFLKDELKLIFQKQREFGLSFSKKFEEEVLSVAFYKRALKDFSHLVGNCSFFTDEKRAPKNSPLAFMFVALTRIINLLNNLKNTEGILYTKDDLNTLLNEVLKNGTLTYKQTKKLLGLSDDYEFKGEKGTYFIEFKKYKEFIKALGDHSLSQDDLNEIAKDITLIKDEIKLKKALAKYDLNQNQIDSLSKLEFKDHLNISFKALKLITPLMLEGKKYDEACNELNLKVVINEDKKDFLPAFNETYYKDEVTNPVVLRAIKEYRKVLNALLKKYGKVHKINIELAREVGKNHSQRAKIEKEQNENYKAKKDAELECEKLGLKINNKNILKLRLFKEQKEFCAYSGEKIKLSDLQDEKMLEIDHIYPYSRSFDDSYMNKVLVFTKQNQEKLNKTPFEAFGNDSTKWQKIEVLAKNLPTKKQKRILDKNYKDKEQKDFKDRNLNDTRYIARLVLNYTKDYLDFLPLSDDENTKLNDIQKGSKVHVEAKSGMLTSALRHTWGFSTKDRNNHLHHAIDAVIIAYANNSIVKAFSDFKKEQESNSAELYAKKISELDYKNKRKFFEPFSGFRQKVLDKIDEIFVSKPERKKPSGALHEETFRKEEEFYQSYGGKEGVLKALELGKIRKVNGKIVKNGDMFRVDIFKHKKTNKFYAVPIYTMDFALKVLPNKAVVQGKDKKSGLIKDWILMDENYEFCFSLYKDSLILIQTKDMQEPEFVYYNAFTSSTVSLIVSKHDNKFETLSKNQKILFKNANEKEVIAKSIGIQNLKVFEKYIVSALGEVTKAEFRQREDFKK

SEQ ID NO: 361 - protein, 984 aa, Campylobacter jejuni
MARILAFDIGISSIGWAFSENDELKDCGVRIFTKAENPKTGESLALPRRLARSARKRLARRKARLNHLKHLIANEFKLNYEDYQSFDESLAKAYKGSLISPYELRFRALNELLSKQDFARVILHIVKRRGYDDIKNSDDKEKGAILKAIKQNEEKLANYQSVGEYLYKEYFQKFKENSKEFTNVRNKKESYERCIAQSFLKDELKLIFKKQREFGFSFSKKFEEEVLSVAFYKRALKDFSHLVGNCSFFTDEKRAPKNSPLAFMFVALTRIINLLNNLKNTEGILYTKDDLNTLLNEVLKNGTLTYKQTKKLLGLSDDYEFKGEKGTYFIEFKKYKEFIKALGDHSLSQDDLNEIAKDITLIKDEIKLKKALAKYDLNQNQIDSLSKLEFKDHLNISFKALKLITPLMLEGKKYDEACNELNLKVAINEDKKDFLPAFNETYYKDEVTNPVVLRAIKEYRKVLNALLKKYGKVHKINIELAREVGKNHSQRAKIEKEQNENYKAKKDAEFECEKLGLKINSKNILKLRLFKEQKEFCAYSGEKIKISDLQDEKMLEIDHIYPYSRSFDDSYMNKVLVFTKQNQEKLNKTPFEAFGNDSAKWQKIEVLAKNLPTKKQKRILDKNYKDKEQKDFKDRNLNDTRYIARLVLNYTKDYLDFLPLSDDENTKLNDTQKGSKVHVEAKSGMLTSALRHTWGFSTKDRNNHLHHAIDAVIIAYANNSIVKAFSDFKKEQESNSAELYAKKISELDYKNKRKFFEPFSGFRQKVLDKIDEIFVSKPERKKPSGALHEETFRKEEEFYQSYGGKEGVLKALELGKIRKVNGKIVKNGDMFRVDIFKHKKTNKFYAVPIYTMDFALKVLPNKAVARSKKGEIKDWILMDENYEFCFSLYKDSLILIQTKDMQEPEFVYYNAFTSSTVSLIVSKHDNKFETLSKNQKILFKNANEKEVIAKSIGIQNLKVFEKYIVSALGEVTKAEFRQREDFKK

SEQ ID NO: 362 - protein, 984 aa, Campylobacter jejuni
MARILAFDIGISSIGWAFSENDELKDCGVRIFTKAENPKTGESLALPRRLARSARKRLARRKARLNHLKHLIANEFKLNYEDYQSFDESLAKAYKGSLISPYELRFRALNELLSKQDFARVILHIVKRRGYDDIKNSDDKEKGTILKAIKQNEEKLANYQSVGEYLYKEYFQKFKENSKEFTNVRNKKESYERCIAQSFLKDELKLIFKKQREFGFSFSKKFEEEVLSVAFYKRALKDFSHLVGNCSFFTDEKRAPKNSPLAFMFVALTRIINLLNNLKNTEGILYTKDDLNTLLNEVLKNGTLTYKQTKKLLGLSDDYEFKGEKGTYFIEFKKYKEFIKALGEHNLSQDDLNEIAKDITLIKDEIKLKKALAKYDLNQNQIDSLSKLEFKDHLNISFKALKLITPLMLEGKKYDEACNELNLKVAINEDKKDFLPAFNETYYKDEVTNPVVLRAIKEYRKVLNALLKKYGKVHKINIELAREVGKNYSQRAKIEKEQNENYKAKKDAELECEKLGLKINSKNILKLRLFKEQKEFCAYSGEKIKISDLQDEKMLEIDHIYPYSRSFDDSYMNKVLVFTKQNQEKLNQTPFEAFGNDSAKWQKIEVLAKNLPTKKQKRILDKNYKDKEQKDFKDRNLNDTRYIARLVLNYTKDYLDFLPLSDDENTKLNDTQKGSKVHVEAKSGMLTSALRHTWGFSAKDRNNHLHHAIDAVIIAYANNSIVKAFSDFKKEQESNSAELYAKKISELDYKNKRKFFEPFSGFRQKVLDKIDEIFVSKPERKKPSGALHEETFRKEEEFYQSYGGKEGVLKALELGKIRKVNGKIVKNGDMFRVDIFKHKKTNKFYAVPIYTMDFALKVLPNKAVARSKKGEIKDWILMDENYEFCFSLYKDSLILIQTKDMQEPEFVYYNAFTSSTVSLIVSKHDNKFETLSKNQKILFKNANEKEVIAKSIGIQNLKVFEKYIVSALGEVTKAEFRQREDFKK

SEQ ID NO: 363 - protein, 987 aa, Campylobacter jejuni
MARILAFDIGISSIGWAFSENDELKDCGVRIFTKAENPKTGESLALPRRLARSARKRLARRKARLNHLKHLIANEFKLNYEDYQSFNESLAKAYKGSLISPYELRFRALNELLSKQDFARVILHIAKRRGYDDIKNSDDKEKGAILKVIKQNEEKLANYQSVGEYLYKEYFQKFKENSKEFTNVRNKKESYERCIAQSFLKDELKLIFQKQREFGFSFSKKFEEEVLSVAFYKRALKDFSHLVGNCSFFTDEKRAPKNSPLAFMFVALTRIINLLNNLKNTEGILYTKDDLNALLNEVLKNGTLTYKQTKKLLGLSDDYEFKGEKGTYFIEFKKYKEFIKALGDHSLSQDDLNEIAKDITLIKDEIKLKKALAKYDLNQNQIDSLSKLEFKDHLNISFKALKLITPLMLEGKKYDEACNELNLKVAINEDKKDFLPAFNETYYKDEVTNPVVLRAIKEYRKVLNALLKKYGKVHKINIELAREVGKNYSQRAKIEKEQNENYKAKKDAELECEKLGLKINSKNILKLRLFKEQKEFCAYSGEKIKISDLQDEKMLEIDHIYPYSRSFDDSYMNKVLVFTKQNQEKLNQTPFEAFGNDSAKWQKIEVLAKNLPTKKQKRILDKNYKDKEQKDFKDRNLNDTRYIARLVLNYTKDYLDFLPLSDDENTKLNDTQKGSKVHVEAKSGMLTSALRHTWGFSAKDRNNHLHHAIDAVIIAYANNSIVKAFSDFKKEQESNSAELYAKKISELDYKNKRKFFEPFSGFRQKVLDKIDEIFVSKPERKKPSGALHEETFRKEEEFYQSYGGKEGVLKALELGKIRKVNGKIVKNGDMFRVDIFKHKKTNKFYAVPIYTMDFALKVLPNKAVARSKKGEIKDWILMDENYEFCFSLYKDSLILIQTKDMQEPELVYFNAFTSSTVSLIVSKHDNKFETLSKNQKILFKNANEKEVIAKSIGIQNLKVFEKYIVSALGEVTKAEFRQREDFKNELR

SEQ ID NO: 364 - protein, 984 aa, Campylobacter jejuni
MARILAFDIGISSIGWAFSENDELKDCGVRIFTKAENPKTGESLALPRRLARSARKRLARRKARLNRLKHLIANEFKLNYEDYQSFDESLAKAYKGSLISPYELRFRALNELLSKQDFARVILHIAKRRGYDDIKNSDDKEKGAILKAIKQNEEKLANYQSVGEYLYKEYFQKFKENSKEFTNVRNKKESYERCIAQSFLKDELKLIFKKQREFGFSFSKKFEEEVLSVAFYKRALKDFSHLVGNCSFFTDEKRAPKNSPLAFMFVALTRIINLLNNLKNTEGILYTKDDLNALLNEVLKNGTLTYKQTKKLLGLSDDYEFKGEKGTYFIEFKKYKEFIKALGDHSLNQDDLNEIAKDITLIKDEIKLKKALAKYDLNQNQIDSLSKLEFKDHLNISFKALKLITPLMLEGKKYDEACNELNLKVAINEDKKDFLPAFNETYYKDEVTNPVVLRAIKEYRKVLNALLKKYGKVHKINIELAREVGKNYSQRAKIEKEQNENYKAKKDAELECEKLGLKINSKNILKLRLFKEQKEFCVYSGEKIKISDLQDEKMLEIDHIYPYSRSFDDSYMNKVLVFTKQNQEKLNQTPFEAFGNDSAKWQKIEVLAKNLPTKKQKRILDKNYKDKEQKDFKDRNLNDTRYIARLVLNYTKDYLDFLPLSDDENTKLNDTQKGSKVYVEAKSGMLTSALRHTWGFSTKDRNNHLHHAIDAVIIAYANNSIVKAFSDFKKEQESNSAELYAKKISELDYKNKRKFFEPFSGFRQKVLDKIDEIFVSKPERKKPSGALHEETFRKEEEFYQSYGGKEGVLKALELGKIRKVNGKIVKNGDMFRVDIFKHKKTNKFYAVPIYTMDFALKVLPNKAVARSKKGEIKDWILMDENYEFCFSLYKDSLILIQTKDMQEPEFVYYNAFTSSTVSLIVSKHDNKFETLSKNQKILFKNANEKEVIAKSIGIQNLKVFEKYIVSALGEVTKAEFRQREDFKK

SEQ ID NO: 365 - protein, 984 aa, Campylobacter jejuni
MARILAFDIGISSIGWAFSENDELKDCGVRIFTKVENPKTGESLALPRRLARSARKRLARRKARLNHLKHLIANEFKLNYEDYQSFDESLAKAYKGSLISPYELRFRALNELLSKQDFARVILHIAKRRGYDDIKNSDDKEKGAILKAIKQNEEKLANYQSVGEYLYKEYFQKFKENSKEFTNVRNKKESYERCIAQSFLKDELKLIFKKQREFGFSFLKKFEEEVLSVAFYKRALKDFSHLVGNCSFFTDEKRAPKNSPLAFMFVALTRIINLLNNLKNTEGILYTKDDLNALLNEVLKNGTLTYKQTKKLLGLSDDYEFKGEKGTYFIEFKKYKEFIKALGEHNLSQDDLNEIAKDITLIKDEIKLKKALAKYDLNQNQIDSLSKLEFKDHLNISFKALKLITPLMLEGKKYDEAYNELNLKVAINEDKKDFLPAFNETYYKDEVTNPVVLRAIKEYRKVLNALLKKYGKVHKINIELAREVGKNHSQRAKIEKEQNENYKAKKDAELECEKLGLKINSKNILKLRLFKEQKEFCAYSGEKIKISDLQDEKMLEIDHIYPYSRSFDDSYMNKVLVFTKQNQEKLNQTPFEAFGNDSAKWQKIEVLAKNLPTKKQKRILDKNYKDKEQKDFKDRNLNDTRYIARLVLNYTKDYLDFLPLSDDENTKLNDTQKGSKVHVEAKSGMLTSALRHTWGFSAKDRNNHLHHAIDAVIIAYANNSIVKAFSDFKKEQESNSAELYAKKISELDYKNKRKFFEPFSGFRQKVLDKIDEIFVSKPERKKPSGALHEETFRKEEEFYQSYGGKEGVLKALELGKIRKVNGKIVKNGDMFRVDIFKHKKTNKFYAVPIYTMDFALKVLPNKAVARSKKGEIKDWILMDENYEFCFSLYKDSLILIQTKDMQEPELVYFNAFTSSTVSLIVSKHDNKFETLSKNQKILFKNANEKEVIAKSIGIQNLKVFEKYIVSALGEVTKAEFRQREDFKK

SEQ ID NO: 366 - protein, 984 aa, Campylobacter jejuni
MARILAFDIGISSIGWAFSENDELKDCGVRIFTKVENPKTGESLALPRRLARSARKRLARRKARLNHLKHLIANEFKLNYEDYQSFDESLAKAYKGSLISPYELRFRALNELLSKQDFARVILHIAKRRGYDDIKNSDDKEKGAILKAIKQNEEKLANYQSVGEYLYKEYFQKFKENSKEFTNVRNKKESYERCIAQSFLKDELKLIFKKQREFGFSFSKKFEEEVLSVAFYKRALKDFSHLVGNCSFFTDEKRAPKNSPLAFMFVALTRIINLLNNLKNTEGILYTKDDLNALLNEVLKNGTLTYKQTKKLLGLSDDYEFKGEKGTYFIEFKKYKEFIKALGEHNLSQDDLNEIAKDITLIKDEIKLKKALAKYDLNQNQIDSLSKLEFKDHLNISFKALKLITPLMLEGKKYDEACNELNLKVAINEDKKDFLPAFNETYYKDEVTNPVVLRAIKEYRKVLNALLKKYGKVHKINIELAREVGKNHSQRAKIEKEQNENYKAKKDAELECEKLGLKINSKNILKLRLFKEQKEFCAYSGEKIKISDLQDEKMLEIDHIYPYSRSFDDSYMNKVLVFTKQNQEKLNKTPFEAFGNDSAKWQKIEVLAKNLPTKKQKRILDKNYKDKEQKDFKDRNLNDTRYIARLVLNYTKDYLDFLPLSNDENTKLNDTQKGSKVHVEAKSGMLTSALRHTWGFSTKDRNNHLHHAIDAVIIAYANNSIVKAFSDFKKEQESNSAELYAKKISELDYKNKRKFFEPFSGFRQKVLDKIDEIFVSKPERKKPSGALHEETFRKEEEFYQSYGGKEGVLKALELGKIRKVNGKIVKNGDMFRVDIFKHKKTNKFYAVPIYTMDFALKVLPNKAVARSKKGEIKDWILMDENYEFCFSLYKDSLILIQTKDMQEPEFVYYNAFTSSTVSLIVSKHDNKFETLSKNQKILFKNANEKEVIAKSIGIQNLKVFEKYIVSALGEVTKAEFRQREDFKK

SEQ ID NO: 367 - protein, 984 aa, Campylobacter jejuni
MARILAFDIGISSIGWAFSENDELKDCGVRIFTKVENPKTGESLALPRRLARSARKRLARRKARLNHLKHLIANEFKLNYEDYQSFDESLAKAYKGSLISPYELRFRALNELLSKQDFARVILHIAKRRGYDDIKNSDDKEKGAILKAIKQNEEKLANYQSVGEYLYKEYFQKFKENSKEFTNVRNKKESYERCIAQSFLKDELKLIFKKQREFGFSFSKKFEEEVLSVAFYKRALKDFSHLVGNCSFFTDEKRAPKNSPLAFMFVALTRIINLLNNLKNTEGILYTKDDLNALLNEVLKNGTLTYKQTKKLLGLSDDYEFKGEKGTYFIEFKKYKEFIKALGEHNLSQDDLNEIAKDITLIKDEIKLKKALAKYDLNQNQIDSLSKLEFKDHLNISFKALKLITPLMLEGKKYDEACNELNLKVAINEDKKDFLPAFNETYYKDEVTNPVVLRAIKEYRKVLNALLKKYGKVHKINIELAREVGKNHSQRAKIEKEQNENYKAKKDAELECEKLGLKINSKNILKLRLFKEQKEFCAYSGEKIKISDLQDEKMLEIDHIYPYSRSFDDSYMNKVLVFTKQNQEKLNKTPFEAFGNDSAKWQKIEVLAKNLPTKKQKRILDKNYKDKEQKDFKDRNLNDTRYIARLVLNYTKDYLDFLPLSDDENTKLNDTQKGSKVHVEAKSGMLTSALRHTWGFSTKDRNNHLHHAIDAVIIAYANNSIVKAFSDFKKEQESNSAELYAKKISELDYKNKRKFFEPFSGFRQKVLDKIDEIFVSKPERKKPSGALHEETFRKEEEFYQSYGGKEGVLKALELGKIRKVNGKIVKNGDMFRVDIFKHKKTNKFYAVPIYTMDFALKVLPNKAVARSKKGEIKDWILMDENYEFCFSLYKDSLILIQTKDMQEPEFVYYNAFTSSTVSLIVSKHDNKFETLSKNQKILFKNANEKEVIAKSIGIQNLKVFEKYIVSALGEVTKAEFRQREDFKK

SEQ ID NO: 368 - protein, 984 aa, Campylobacter jejuni
MARILAFDIGISSIGWAFSENDELKDCGVRIFTKVENPKTGESLALPRRLARSARKRLARRKARLNHLKHLIANEFKLNYEDYQSFDESLAKAYKGSLISPYELRFRALNELLSKQDFARVILHIAKRRGYDDIKNSDDKEKGAILKAIKQNEEKLANYQSVGEYLYKEYFQKFKENSKEFTNVRNKKESYERCIAQSFLKDELKLIFKKQREFGFSFSKKFEEEVLSVAFYKRALKDFSHLVGNCSFFTDEKRAPKNSPLAFMFVTLTRIINLLNNLKNTEGILYTKDDLNALLNEVLKNGTLTYKQTKKLLGLSDDYEFKGEKGTYFIEFKKYKEFIKALGEHNLSQDDLNEIAKDITLIKDEIKLKKALAKYDLNQNQIDSLSKLEFKDHLNISFKALKLITPLMLEGKKYDEACNELNLKVAINEDKKDFLPAFNETYYKDEVTNPVVLRAIKEYRKVLNALLKKYGKVHKINIELAREVGKNHSQRAKIEKEQNENYKAKKDAELECEKLGLKINSKNILKLRLFKEQKEFCAYSGEKIKISDLQDEKMLEIDHIYPYSRSFDDSYMNKVLVFTKQNQEKLNKTPFEAFGNDSAKWQKIEVLAKNLPTKKQKRILDKNYKDKEQKDFKDRNLNDTRYIARLVLNYTKDYLDFLPLSDDENTKLNDTQKGSKVHVEAKSGMLTSALRHTWGFSTKDRNNHLHHAIDAVIIAYANNSIVKAFSDFKKEQESNSAELYAKKISELDYKNKRKFFEPFSGFRQKVLDKIDEIFVSKPERKKPSGALHEETFRKEEEFYQSYGGKEGVLKALELGKIRKVNGKIVKNGDMFRVDIFKHKKTNKFYAVPIYTMDFALKVLPNKAVARSKKGEIKDWILMDENYEFCFSLYKDSLILIQTKDMQEPEFVYYNAFTSSTVSLIVSKHDNKFETLSKNQKILFKNANEKEVIAKSIGIQNLKVFEKYIVSALGEVTKAEFRQREDFKK

SEQ ID NO: 369 - protein, 984 aa, Campylobacter jejuni
MARILAFDIGISSIGWAFSENDELKDCGVRIFTKVENPKTGESLALPRRLARSARKRLARRKARLNHLKHLIANEFKLNYEDYQSFDESLAKAYKGSLISPYELRFRALNELLSKQDFARVILHIAKRRGYDDIKNSDDKEKGAILKAIKQNEEKLANYQSVGEYLYKEYFQKFKENSKEFTNVRNKKESYERCIAQSFLKDELKLIFKKQREFGFSFSKKFEEEVLSVAFYKRALKDFSHLVGNCSFFTDEKRAPKNSPLAFMFVALTRIINLLNNLKNTEGILYTKDDLNALLNEVLKNGTLTYKQTKKLLGLSDDYEFKGEKGTYFIEFKKYKEFIKALGEHNLSQDDLNEIAKDITLIKDEIKLKKALAKYDLNQNQIDSLSKLEFKDHLNISFKALKLITPLMLEGKKYDEACNELNLKVAINEDKKDFLPAFNETYYKDEVTNPVVLRAIKEYRKVLNALLKKYGKVHKINIELAREVGKNHSQRAKIEKEQNENYKAKKDAELECEKLGLKINSKNILKLRLFKEQKEFCAYSGEKIKISDLQDEKMLEIDHIYPYSRSFDDSYMNKVLVFTKQNQEKLNKTPFEAFGNDSAKWQKIEVLAKNLPTKKQKRILDKNYKDKEQKDFKDRNLNDTRYIARLVLNYTKDYLDFLPLSDDENTKLNDTQKGSKVHVEAKSGMLTSALRHTWGFSTKDRNNHLHHAIDAVIIAYANNSIVKAFSDFKKEQESNSAELYAKKISELDYKNKRKFFEPFSGFRQKVLDKIDEIFVSKPERKKPSGALHEETFRKEEEFYQSYGGKEGVLKALELGKIRKVNGKIVKNGDMFRVDIFKHKKTNKFYAVPIYTMDFALKVLPNKAVARSKKGEIKDWILMDENYEFCFSLYKDSLILIQTKDMQEPEFVYYNAFTSSTVSLIVSKHDNKFETLSKNQKILFKNANEKEVIAKSIGIQNLKVFEKYIVSALGEVTKAEFIQREDFKK

SEQ ID NO: 370 - protein, 987 aa, Campylobacter jejuni
MARILAFDIGISSIGWAFSENDELKDCGVRIFTKVENPKTGESLALPRRLARSARKRLARRKARLNHLKHLIANEFKLNYEDYQSFDESLAKAYKGSLISPYELRFRALNELLSKQDFARVILHIAKRRGYDDIKNSDDKEKGAILKAIKQNEEKLANYQSVGEYLYKEYFQKFKENSKEFTNVRNKKESYERCIAQSFLKDELKLIFKKQREFGFSFSKKFEEEVLSVAFYKRALKDFSHLVGNCSFFTDEKRVPKNSPLAFMFVALTRIINLLNNLKNTEGILYTKDDLNALLNEVLKNGTLTYKQTKKLLGLSDDYEFKGEKGTYFIEFKKYKEFIKALGEHNLSQDDLNEIAKDITLIKDEIKLKKALAKYDLNQNQIDSLSKLEFKDHLNISFKALKLITPLMLEGKKYDEACNELNLKVAINEDKKDFLPAFNETYYKDEVTNPVVLRAIKEYRKVLNALLKKYGKVHKINIELAREVGKNHSQRAKIEKEQNENYKAKKDAELECEKLGLKINSKNILKLRLFKEQKEFCAYSGEKIKISDLQDEKMLEIDHIYPYSRSFDDSYMNKVLVFTKQNQEKLNQTPFEAFGNDSAKWQKIEVLAKNLPTKKQKRILDKNYKDKEQKNFKDRNLNDTRYIARLVLNYTKDYLDFLPLSDDENTKLNDTQKGSKVHVEAKSGMLTSALRHTWGFSAKDRNNHLHHAIDAVIIAYANNSIVKAFSDFKKEQESNSAELYAKKISELDYKNKRKFFEPFSGFRQKVLDKIDEIFVSKPERKKPSGALHEETFRKEEEFYQSYGGKEGVLKALELGKIRKVNGKIVKNGDMFRVDIFKHKKTNKFYGVPIYTMDFALKVLPNKAVARSKKGEIKDWILMDENYEFCFSLYKDSLILIQTKDMQEPEFVYYNAFTSSTVSLIVSKHDNKFETLSKNQKILFKNANEKEVIAKSIGIQNLKVFEKYIVSALGEVTKAEFRQREDFKNELR

SEQ ID NO: 371 - protein, 984 aa, Campylobacter jejuni
MARILAFDIGISSIGWAFSENDELKDCGVRIFTKVENPKTGESLALPRRLARSARKRLARRKVRLNHLKHLIANEFKLNYEDYQSFDESLAKAYKGSLISPYELRFRALNELLSKQDFARVILHIAKRRGYDDIKNSDDKEKGAILKAIKQNEEKLANYQSVGEYLYKEYFQKFKENSKEFTNVRNKKESYERCIAQSFLKDELKLIFKKQREFGFSFSKKFEEEVLSVAFYKRALKDFSHLVGNCSFFTDEKRAPKNSPLAFMFVALTRIINLLNNLKNTEGILYTKDDLNALLNEVLKNGTLTYKQTKKLLGLSDDYEFKGEKGTYFIEFKKYKEFIKALGEHNLSQDDLNEIAKDITLIKDEIKLKKALAKYDLNQNQIDSLSKLEFKDHLNISFKALKLITPLMLEGKKYDEACNELNLKVAINEDKKDFLPAFNETYYKDEVTNPVVLRAIKEYRKVLNALLKKYGKVHKINIELAREVGKNHSQRAKIEKEQNENYKAKKDAELECEKLGLKINSKNILKLRLFKEQKEFCAYSGEKIKISDLQDEKMLEIDHIYPYSRSFDDSYMNKVLVFTKQNQEKLNKTPFEAFGNDSAKWQKIEVLAKNLPTKKQKRILDKNYKDKEQKDFKDRNLNDTRYIARLVLNYTKDYLDFLPLSDDENTKLNDTQKGSKVHVEAKSGMLTSALRHTWGFSTKDRNNHLHHAIDAVIIAYANNSIVKAFSDFKKEQESNSAELYAKKISELDYKNKRKFFEPFSGFRQKVLDKIDEIFVSKPERKKPSGALHEETFRKEEEFYQSYGGKEGVLKALELGKIRKVNGKIVKNGDMFRVDIFKHKKTNKFYAVPIYTMDFALKVLPNKAVARSKKGEIKDWILMDENYEFCFSLYKDSLILIQTKDMQEPEFVYYNAFTSSTVSLIVSKHDNKFETLSKNQKILFKNANEKEVIAKSIGIQNLKVFEKYIVSALGEVTKAEFRQREDFKK

SEQ ID NO: 372 - protein, 721 aa, Campylobacter jejuni
MFVALTRIINLLNNLKNTEGILYTKDDLNTLLNEVLKNGTLTYKQTKKLLGLSDDYEFKGEKGTYFIEFKKYKEFIKALGDHSLSQDDLNEIAKDITLIKDEIKLKKALAKYDLNQNQIDSLSKLEFKDHLNISFKALKLITPLMLEGKKYDEACNELNLKVAINEDKKDFLPAFNETYYKDEVTNPVVLRAIKEYRKVLNALLKKYGKVHKINIELAREVGKNYSQRAKIEKEQNENYKAKKDAELECEKLGLKINSKNILKLRLFKEQKEFCAYSGEKIKISDLQDEKMLEIDHIYPYSRSFDDSYMNKVLVFTKQNQEKLNQTPFEAFGNDSAKWQKIEVLAKNLPTKKQKRILDKNYKDKEQKDFKDRNLNDTRYIARLVLNYTKDYLDFLPLSDDENTKLNNTQKGSKVYVEAKSGMLTSALRHTWGFSTKDRNNHLHHAIDAVIIAYANNSIVKAFSDFKKEQESNSAELYAKKISELDYKNKRKFFEPFSGFRQKVLDKIDEIFVSKPERKKPSGALHEETFRKEEEFYQSYGGKEGVLKALELGKIRKVNGKIVKNGDMFRVDIFKHKKTNKFYAVPIYTMDFALKVLPNKAVARSKKGEIKDWILMDENYEFCFSLYKDSLILIQTKDMQEPEFVYYNAFTSSTVSLIVSKHDNKFETLSKNQKILFKNANEKEVIAKSIGIQNLKVFEKYIVSALGEVTKAEFRQREDFKK

SEQ ID NO: 373 - protein, 512 aa, Campylobacter jejuni
MHKINIELAREVGKNHSQRAKIEKEQNENYKAKKDAEIECEKLGLKINSKNILKLRLFKEQKEFCAYSGEKIKLSDLQDEKMLEIDHIYPYSRSFDDSYMNKVLVFTKQNQEKLNKTPFEAFGNDSTKWQKIEVLAKNLPEKKQKRILDKNYKDKEQKDFKDRNLNDTRYIARLVLNYTKDYLDFLPLSDDENTKLNDTQKGSKVHVEAKSGMLTSALRHTWGFSAKDRNNHLHHAIDAAIIAYANNSIVKAFSDFKKEQESNSVELYAKKISELDYKNKRKFFEPFSGFRQKVLDKIDEIFVSKPERKKPSGALHEETFRKEEEFYQSYGGKEGVLKALELGKIRKVNGKIVKNGDMFRVDIFKHKKTNKFYAVPIYTMDFALKVLPNKAVARSKKGEIKDWILMDENYEFCFSLYKDSLILIQTKDMQEPELVYFNAFTSSTVSLIVSKHDNKFETLSKNQKILFKNANEKEVIAKSIGIQNLKVFEKYIVSALGEVTKAEFRQREDFKK

SEQ ID NO: 374 - protein, 965 aa, Campylobacter jejuni
MKIIGFNLGIANIGWALRENDEIIDCGVRVFDIPENPKNGNSLALERRENKARMKIVKRKKARMLATKTFLKKELNVDLSKLFLIGSTQSIYELRAKALSSLISKEELSAIILHIAKHRGYDDSALKNENGTIIEALNKNKETMLKFKSVGEYFYKNFVQNKEVKKIRNTTEDYSNSVPRSLLKQELDLILDKQKELGLIKNADFKEKLFEIIFFKRPLKDFSNKIGNCIFFENEKRAAKNTISACEFVALGKVVNLLKSIEKDIGIVYEKDSINEIMSIILDKTSISYKKIRDILNLPQEINFKGLDYSKNNVENSKLVDLKKLNEFKKALGDGFANLDKDILDSIATDITLTKDTATLKEKLKNYNVLNAEQIEKLSELVFNDHINLSLKALKQIIPLMYEGKRYDEACELCNFTIAKNQEKSEYLPLFEKTRFAKDISSPVVIRAICEFRKLLNDIIRRYGSVHKIHLELTRDFGISFSDRKKIIKEIEQNEQSRIKALETIKELKLEETSKNIQIVRLFEDQKGICPYSGLKMDLNRLDELVIDYIRPYNRSLDDSYSNKVLTFKKLSDLKQGKTPFEAFGEDEKLWAEINERIKEYNGKKRFKIFDKFFKDKKPFDFTEQTLQDTRWLTKLVASYLNEYLSFLPISEDENTALGYGEKGSKQHVILSSGMITQMLRNFWYLGFKNHKDYKNNAMDAIIVAFTTNSIIFAFNNFKKELDLAKAEFYANKISESDYLLKRKFLPPFSGFKEQALEKVKNIFVSHSLKIKNKGTLHDLTPLKIKELKNTYGDLDLAVKLGKIRKYNDKYYANANGSLVRADLFVDKKNKFHAVSIYKADFSTKKLPNKTPATTSNGETKEGIEMNENYNFCMSLYKNTPISVKIKGMKEPIICYYHGFNTSGSKITYKKHDNNYHNLSEDEMVVFRKNDKESIAVGKILEIKKYSISPSGELSLIENEERKWF

SEQ ID NO: 375 - protein, 759 aa, Campylobacter jejuni
MLSVAFYKRALKDFSHLVGNCSFFTDEKRAPKNSPLAFMFVALTRIINLLNNLKNTEGILYTKDDLNALLNEVLKNGTLTYKQTKKLLGLSDDYEFKGEKGTYFIEFKKYKEFIKALGEHNLSQDDLNEIAKDITLIKDEIKLKKALAKYDLNQNQIDSLSKLEFKDHLNISFKALKLITPLMLEGKKYDEACNELNLKVAINEDKKDFLPAFNETYYKDEVTNPVVLRAIKEYRKVLNALLKKYGKVHKINIELAREVGKNHSQRAKIEKEQNENYKAKKDAELECEKLGLKINSKNILKLRLFKEQKEFCAYSGEKIKISDLQDEKMLEIDHIYPYSRSFDDSYMNKVLVFTKQNQEKLNKTPFEAFGNDSAKWQKIEVLAKNLPTKKQKRILDKNYKDKEQKDFKDRNLNDTRYIARLVLNYTKDYLDFLPLSDDENTKLNDTQKGSKVHVEAKSGMLTSALRHTWGFSTKDRNNHLHHAIDAVIIAYANNSIVKAFSDFKKEQESNSAELYAKKISELDYKNKRKFFESFSGFRQKVLDKIDEIFVSKPERKKPSGALHEETFRKEEEFYQSYGGKEGVLKALELGKIRKVNGKIVKNGDMFRVDIFKHKKTNKFYAVPIYTMDFALKVLPNKAVARSKKGEIKDWILMDENYEFCFSLYKDSLILIQTKDMQEPEFVYYNAFTSSTVSLIVSKHDNKFETLSKNQKILFKNANEKEVIAKSIGIQNLKVFEKYIVSALGEVTKAEFRQREDFKK

SEQ ID NO: 376 - protein, 984 aa, Campylobacter jejuni
MVRILAFDIGISSIGWAFSENDELKDCGVRIFTKVENPKTGESLALPRRLARSARKRLARRKARLNHLKHLIANEFKLNYEDYQSFDESLAKAYKGSLISPYELRFRALNELLSKQDFARVILHIAKRRGYDDIKNSDDKEKGAILKAIKQNEEKLANYQSVGEYLYKEYFQKFKENSKEFTNVRNKKESYERCIAQSFLKDELKLIFKKQREFGFSFSKKFEEEVLSVAFYKRALKDFSHLVGNCSFFTDEKRAPKNSPLAFMFVALTRIINLLNNLKNTEGILYTKDDLNALLNEVLKNGTLTYKQTKKLLGLSDDYEFKGEKGTYFIEFKKYKEFIKALGEHNLSQDDLNEIAKDITLIKDEIKLKKALAKYDLNQNQIDSLSKLEFKDHLNISFKALKLITPLMLEGKKYDEACNELNLKVAINEDKKDFLPAFNETYYKDEVTNPVVLRAIKEYRKVLNALLKKYGKVHKINIELAREVGKNHSQRAKIEKEQNENYKAKKDAELECEKLGLKINSKNILKLRLFKEQKEFCAYSGEKIKISDLQDEKMLEIDHIYPYSRSFDDSYMNKVLVFTKQNQEKLNKTPFEAFGNDSAKWQKIEVLAKNLPTKKQKRILDKNYKDKEQKDFKDRNLNDTRYIARLVLNYTKDYLDFLPLSDDENTKLNDTQKGSKVHVEAKSGMLTSALRHTWGFSTKDRNNHLHHAIDAVIIAYANNSIVKAFSDFKKEQESNSAELYAKKISELDYKNKRKFFEPFSGFRQKVLDKIDEIFVSKPERKKPSGALHEETFRKEEEFYQSYGGKEGVLKALELGKIRKVNGKIVKNGDMFRVDIFKHKKTNKFYAVPIYTMDFALKVLPNKAVARSKKGEIKDWILMDENYEFCFSLYKDSLILIQTKDMQEPEFVYYNAFTSSTVSLIVSKHDNKFETLSKNQKILFKNANEKEVIAKSIGIQNLKVFEKYIVSALGEVTKAEFRQREDFKK

SEQ ID NO: 377 - protein, 1003 aa, Campylobacter lari]
MRILGFDIGINSIGWAFVENDELKDCGVRIFTKAENPKNKESLALPRRNARSSRRRLKRRKARLIAIKRILAKELKLNYKDYVAADGELPKAYEGSLASVYELRYKALTQNLETKDLARVILHIAKHRGYMNKNEKKSNDAKKGKILSALKNNALKLENYQSVGEYFYKEFFQKYKKNTKNFIKIRNTKDNYNNCVLSSDLEKELKLILEKQKEFGYNYSEDFINEILKVAFFQRPLKDFSHLVGACTFFEEEKRACKNSYSAWEFVALTKIINEIKSLEKISGEIVPTQTINEVLNLILDKGSITYKKFRSCINLHESISFKSLKYDKENAENAKLIDFRKLVEFKKALGVHSLSRQELDQISTHITLIKDNVKLKTVLEKYNLSNEQINNLLEIEFNDYINLSFKALGMILPLMREGKRYDEACEIANLKPKTVDEKKDFLPAFCDSIFAHELSNPVVNRAISEYRKVLNALLKKYGKVHKIHLELARDVGLSKKAREKIEKEQKENQAVNAWALKECENIGLKASAKNILKLKLWKEQKEICIYSGNKISIEHLKDEKALEVDHIYPYSRSFDDSFINKVLVFTKENQEKLNKTPFEAFGKNIEKWSKIQTLAQNLPYKKKNKILDENFKDKQQEDFISRNLNDTRYIATLIAKYTKEYLNFLLLSENENANLKSGEKGSKIHVQTISGMLTSVLRHTWGFDKKDRNNHLHHALDAIIVAYSTNSIIKAFSDFRKNQELLKARFYAKELTSDNYKHQVKFFEPFKSFREKILSKIDEIFVSKPPRKRARRALHKDTFHSENKIIDKCSYNSKEGLQIALSCGRVRKIGTKYVENDTIVRVDIFKKQNKFYAIPIYAMDFALGILPNKIVITGKDKNNNPKQWQTIDESYEFCFSLYKNDLILLQKKNMQEPEFAYYNDFSISTSSICVEKHDNKFENLTSNQKLLFSNAKEGSVKVESLGIQNLKVFEKYIITPLGDKIKADFQPRENISLKTSKKYGLR

SEQ ID NO: 378 - protein, 372 aa, candidate division
DNESAINQIAYILTTQKADEGIRAELDSLPLSDKAKKAIVKIKPTNFKAFGHLSIKALQKITPHILEGMTYDKACEAAGYDFKKQSASLEQITNPVVKRAITQTLKVVRAIERKYGKPYFIKVETARDLAKNFKDRNAIKKENEENQGYNEDIKSIITNGYEASPKTKGGKQLLNHLKEFNVRLNKNADFNGQQIIKVKLYREQQGKCLYSGNPIDFETMLRDDNAYQVDHIVPFSRSNNDGITNKVLVFTEENQKKADRTPFEYFGTDERRWEKFVALVETTYKTRDVKTSDKATNAINYEYNGYAMKKKQNLLLQDYKNDSWNVRALNDTRYITRFIQNYLRQNVDFAEGEEKQRIIAPNGTTTAYLRKR

SEQ ID NO: 379 - protein, 1117 aa, Capnocytophaga ochracea
MKHILGLDLGSNSIGWAFVQQDFENKQGKIIATGSRIIPMDQGILGDFERGNTVSQTAERTTYRSMRRLRERHLLRRERLHRVLHLLGFLPPHYDAQIDFTKRYGKFIDNAEPKIAYNNGNFIFMNSFNEMVEDFKKHQPQLFYKKSNGEESRIPYDWTIYYLRKKALSQKITQQELAWLILHFNQKRGYYQLRGEEETENPNKEVAFHSLKVVDVEAEAPNKKGEIWYTIRLENGWIYRRTSKNPLDDWKGKTRDFIVTTDLNDDGTIKLDKEGKEKRSFRAPDENDWNLLKKKTEHDIDFSGKPVGTYIYDHLLQNPNQKIKGKLVRTIERKYYKDELKAILAKQIALQPELFTETLLADCIRELYRKNETQQQNLLSKDFLHLFVEDIIFYQRPLCSKKSTIANCTLEKRSYIDKETNERKDAPIKVCAKSNPYYQEFRVLQWLQNLRIYEIETDREVTAEFIETPQDYEALFNFLMSQKEIDNEGLLKYFLFAKNPQIKDKAAKSELKKWLTTYRWNYVYDAADNSSKKYPMNETGYELQRYLQKVEGLPANFLTFDITYQLWHLLYSVKDKVEFEKALKKFAKKKQLDKTSFVDSFKNFKPYPNEYGSFSEKAIKKLLPLMRFGNHWDFNRIDVSTQKRIDDLINGVANEDIRTIIREKAEKYQLNSETCFQDLPLWLAQYVVYNRHAEATDIEKWTSVSDLEAYLEDFKQHSLRNPIVEQVVTETLRVVRDIWQQYSGGQANFFDEIHIELGRELKKTAEERKQLSDKNQENENTNLRIKKLLAELKEDASIQNVRPYSLVQQELLKIYEEGVFSSTDEIEEDIQKIRKKVEPTPPEIQRYKLWLEQKYKSPYTGEVISLTKLFTEEYEIEHIIPQSRYYDDSLSNKVICESAVNKLKTNQLGLEFIQNHHGEKVRITANKEVTIFTEEQYKEFVKKHYANNSAKQQKLLLNEIPEKMVARQLNDTRYISKCISEILSKIVRSDEKDEGVNSKNIIPCTGKITTALKQDWGLNDVWNELILPRFERMNQLTQTQLFTSYNDRLQKNLPTVPIEYSQGFQKKRIDHRHHAMDALVIACATREHINYMNNQHALDKSKDKKEKQQSRIDLHPL

SEQ ID NO: 380 - protein, 303 aa, Capnocytophaga ochracea
MSFKQNLRVINKATNYYEKWEEKNGVLVKKKVKQEGTNWAIRKPLHKETVSGKIVLDRKIGKDKILTATRKAVDITFTEKIISSITDTGIQKILLNYLKYKGSPEVAFSAEGLEELNKNIAQYNDGKKHQPIYKVRIFEEGSKFPLGETGAKATKYVEAAKGTNLFFGVYQGKEKRTYATIPLNEVIERQKQGLPSVPERNEKGEPLLFSLSPNDLVYVPMEGEIAETIDFNNLSKEQKERIYKTVSFTGNQCFFVQEAVASPIVNKMEYSPLNKMERDILGIMIKEVCVKLKVDRLGNIIKA

SEQ ID NO: 381 - protein, 1471 aa, Capnocytophaga sp.
MCKYFYIKNFITFVLSKSIIPMKHILGLDLGSNSIGWAFVQQDFENKQGKIIATGSRIIPMDQGILGDFERGNTVSQTAERTTYRSTRRLRERHLLRRERLHRVLHILGFLPPHYDAQIDFTKRYGKFIDNAEPKIAYNNGNFIFMNSFNEMIEDFKKHQPQLFYKKSNGEESKIPYDWTIYYLRKKALSQKITQQELAWLILHFNQKRGYYQLRGEEETENPNKEVAFHSLKVVDVEAEAPNKKGEIWYTIRLENGWIYRRTSKIPLDDWKGKTRDFIVTTDLNDDGTIKVDKEGKEKRSFRAPDENDWNLLKKKTEHDIDFSGKTVGAYIYDHLLQNPNQKIKGKLVRTIERKYYKDELKAILAKQIALQPELFTETLLADCIRELYRKNETQQQNLLSKDFLHLFVEDIIFYQRPLRSKKSTIANCTLEKRSYIDKETNERKDAPIKVCAKSNPYYQEFRVLQWLQNLRIYEIETDREVTAEFIETPQDCEALFNFLMSQKEIDNKGLLKYFLFAKNPQIKDKAAKSELKKWLTTYRWNYVYDAADNSSKKYPMNETGYELQRYLQKVEGLPANFLTFDITYQLWHLLYSVKDKVEFEKALKKFAKKKQLDKTSFVDSFKNFKPYPNEYGSFSEKAIKKLLPLMRFGNHWDFNRIDVSTQKRIDDLINGVANEDIRTIIREKAEKYQLNSETCFQDLPLWLAQYVVYNRHAEATDIEKWTSVSDLEAYLEDFKQHSLRNPIVEQVVTETLRVVRDIWQQYGGGQANFFDEIHIELGRELKKTAEERKQLSDKNQENESTNLRIKKLLAELKEDASIQNVRPYSLVQQELLKIYEEGVFSATDEVEEDIQKIRKKAEPSKADLQRYKLWLEQKYKSPYTGEVISLTKLFTEEYEIEHIIPQSRYYDDSLSNKVICESAVNKLKTNQLGLEFIQNHHGEKVRITANKEVTIFTEEQYKEFVKKHYANNSAKQQKLLLNEIPEKMVARQLNDTRYISKYISEILSKIVRSDEKDEGVNSKNIIPCTGKITTALKQDWGLNDVWNKLILPRFERMNQLTQTQLFTSYNDRLQKNLPTVPIEYSQGFQKKRIDHRHHAMDALVIACATREHINYMNNQHALDKSKDKKEKQQSRIDLRTILCEKKNNNWQFKKPWSTFTQEAKEALEHIVVSFKQNLRVINKATNYYEKWEEKNGVLVKKKVKQEGTNWAIRKPLHKETVSGKIVLDRKIGKDKILTATRKAVDITFTEKIISSITDTGIQKILLNYLKYKGSPEVAFSTEGLEELNKNIAQYNNGKKHQPIYKVRIFEEGSKFPLGETGAKATKYVEAAKGTNLFFGVYQGKGKRTYATIPLNEVIERQKQGLPSVPERNEKGEPLLFSLSPNDLVYVPMEGEIAETIDFNNLSKEQKERIYKTVSFTGNQCFFVQEAVATPIVNKMEYSPLNKMERDILGTMIKEVCIKLKVDRLGNITKA

SEQ ID NO: 382 - protein, 1450 aa, Capnocytophaga sp.
MKHILGLDLGSNSIGWAFVQQDFENKQGKIIATGSRIIPMDQGILGDFERGNTVSQTAERTTYRNTRRLRERHLLRRERLHRVLHILGFLPPHYDSQIDFTKRYGKFIDNAEPKIAYNNGNFIFMNSFNEMIEDFKKYQPQLFYKKSNGEESKIPYDWTIYYLRKKALSQKITQQELAWLILHFNQKRGYYQLRGEEETENPNKEVAFHSLEVVDVEAEAPNKKGEIWYTIRLENGWIYRRTSKIPLDDWKGKTRDFIVTTDLNDDGTIKLDKEGKEKRSFRAPDENDWNLLKKKTEHDIDFSGKTVGAYIYDHLLQNPNQKIKGKLVRTIERKYYKDELKAILAKQIALQPELFTETLLADCIRELYRKNETQQQNLLSKDFLHLFVEDIIFYQRPLRSKKSTIANCTLEKRSYIDKETNERKDTPIKVCAKSNPYYQEFRVLQWLQNLRIYEIETDREVTAEFIETAQDNEALFNFLMSQKEIDNESLLKYFLFAKNPQIKDKVAKSELKKWLTTYRWNYVYDAADNSSKKYPMNETGYELQQYLQKVEGLPANFLTFDITYRLWHLLYSVKDKVEFEKALKKFAQEYQLDEASFVDSFKNFKPYPNEYGSFSEKAIKKLLPLMRFGNHWDFNRIDVSTQKRIDDLINGVANDEIRTIIREKAEKYQLNSETCFQGLPLWLAQYVVYNRHAEAADIEKWTSVNDLEAYLEDFKQHSLRNPIVEQVITETLRVVRDIWQRYGGGQANFFDEIHIELGRELKKTAEERKQLSNRNQENENTNLRIKKLLAELKEDASIQNVRPYSPVQQELLKIYEEGVFSATDEVEEDIQKIRKKAEPTTPEIQRYKLWLEQKYKSPYTGEVISLTKLFTEEYEIEHIIPQSRYYDDSLSNKVICESAVNKLKTNQLGLEFIQNHHGEKVRITANKEVTIFTEEQYKEFVKKHYANNSAKQQKLLLNEIPEKMVARQLNDTRYISKYISEILSKIVRSDEKDEGVNSKNIIPCTGKITTALKQDWGLNDVWNELILPRFERMNQLTQTQLFTSYNDRFQKNLPTVPIEYSQGFQKKRIDHRHHAMDALVIACATREHINYMNNQHALDKSKDKKEKQQSRIDLRTILCEKKNNNWQFKKPWSTFTQEAQEALEHIVVSFKQNLRVINKATNYYEKWEEKNGVLVKKKVKQEGTNWAIRKPLHKETVSGKIVLDRKIGKDKILTATRKSVDITFTEKIISSITDTGIQKILLNYLKYKGSPEVAFSAEGLEELNKNIAQYNDGKKHQPIYKVRIFEEGSKFPLGETGAKATKYVEAAKGTNLFFGVYQGKGKRTYATIPLNEVIERQKQGLPSVPERNEKGEPLLFSLSPNDLVYVPMEGEIAETIDFNNLSKEQKERIYKTVSFTGNQCFFVQEAVATPIVNKIEYSPLNKMERDILGTMIKEVCIKLKVDRLGNITKA

SEQ ID NO: 383 - protein, 1435 aa, Capnocytophaga sp.
MKNILGLDLGTTSIGFAHIVEDENKEKSEIKELGVRIVSLATDEQSDFEKGKSISTNANRTLKHGARLNLDRYQQRRKFLIDLLQKANLITSASILAENGKNTTHSTWQLRAKAVTERIEKEEFARVLLAINKKRGYKNSRKTKTEDEGQAIDGMAIAKCLYDENLTPGQLSLQLLQQNKKLLPDFYRSDLQKEFDLVWNLQKQFYPDILTDSFYKELQGKGKDATSKAFSKRYHFDTAENKGSKESVRLQAYQWRAEAISKQLSKEEVAYVLTEINNNLNNSSGYLGAISDRSKELYFNRQTVGQYLYAQLQENRHNSLKNKVFYRQDYLDEFERIWETQASFHKELTDELKKQIRDVVIFYQRKLKSQKGLVSFCEFESKEIEIEKDGKAITKSIGARVVPKSSPLFQEFKIWQILNNVTCKRKGIRKKKSSAKSTELDLFNEPSQSIFSLDMECKQLLFDELNLKGDLKSDKVLKLLGYSPQEWEINYNQLEGNRTQKSLYEAYLKIIEIEGYEVKDILQIKSTKDDWSLDESPLSASEIRERVKVIFQTLGICTKILYFDPLLPVKEFEQQYSYQLWHLLYSYESDDSTSGNETLYRILEKKYAFKREHATILANVALQDDYGSLSTKAIRKIYPYIKENQYSTACELAGYKHSKLSLTTEELEARELKNIIPLLKKNALRNPVVEKILNQMINVVNALIEKNSERDAEGKITKYFHFDEIRIELARELKKNAQERYEMTQNINKAKLEHQKISEKLQKQFGIKNPTKSDIIRYRLYQELEHNGYKELYTNTYIAPDVLFSKNIDIEHIVPKARVFDDSFSNKTLAFKEFNIKKGESTAFDYITSLNCEGELNQYLTRVENAYKTKSISLTKYKNLLKKASEIGDGFINRDLRDTQYIAKKAKEILFQVTKNVLSTSGSITDRLREDWGLVDVMKELNMPKYQSLGLTEVEERKDGNKVTVIKDWTKRNDHRHHAMDALTVAFTKPSYIQYLNHLNARKDENNKNYSVILAIEKKETIKVPINNGKNKRVFIEPILNFRQVAKKHLEEIFISHKAKNKVVTKNINKPAGTDKQQITLTPRGQLHKETIYGKYQYYVNKEEKVGVKFDERTITKVSNPLYREALLKRLQANDNDPKKAFAGKNALSKNPIYLDEAKTKTLPEKVNLTYLEEDFSIRKDISPDNFKDLKSIEKVIDQGVKRILIKRLQAYDNDPKKAFVDLEKNPIWLNKEKGIAIKRVTISGVSNAQPLHIGKDHLGKTTLNKEGKEVPVDYVSTGNNHHVAIYRDKEGNLQEQIVSFFEAVVRAQQGLPIIDKNYKQAEGWQFMFTMKQNEMFVFPNEATGFNPAEIDLLDPKNKKLISPNLFRVQTISIVKYGNSVVRDFKFRHHLETTLQDDKILQGITFQQIKSLEPLRNIVKVRINHLGDIVNIGEY

SEQ ID NO: 384 - protein, 1432 aa, Capnocytophaga sp.
MKNILGLDLGTTSIGFAHIVEDENKEKSEIKELGVRIVSLTTDEQSDFEKGKSITTNANRTLKHGARLNLDRYQQRRKYLIDLLHKANLITPSSILAENGKNTTHSTWQLRAKAVTERIEKEEFARILLAINKKRGYKSSRKAKTEDEGQAIDGMAIAKRLYDENLTPGQLSLQLLQQNKKLLPDFYRSDLQKEFDLVWNFQKQFYPDILTDIFYKELQGKGKDATSKAFSKRYHFDTAENKGSKESVRLQAYQWRAEAVSKQLSKEEVAYVLTEINNNLNNASGYLGAISDRSKELYFNRQTVGQYLYAQLQENRHNSLKNKVFYRQDYLDEFERIWETQALFHKELTDELKKQIRDVVIFYQRKPKSQKGLISFCEFESKEIEIEKDGKTITKNIGARVVPKSSPLFQEFKIWQILNNVICKRKGIRKKKISAKTTQLDLLNESSQTIFSLDMECKQLLFDELNLKGDLKSDKVLKLLGYSPQEWEINYNQLEGNRTQKALYEAYLKIVEMEAHDVKDILQIKSTKDDWSLDESPLSASEIRESVKAIFQALGICTKILYFDPLLPVKDFEEQDSYQLWHLLYSYESDDSTSGNETLYRILEKKYAFKREHARILANVALQDDYGSLSTKAIRKIYPNIKENQYSTACEMAGYKHSKLSLTTEELEARELKNIIPLLKKNALRNPVVEKILNQMINVVNALIEKNSERDAEGKITKYFHFDEIRIELARELKKNAQKRYEMTQNINKAKSEHQKISEILQKEFGIKNPTKSDIIRYRLYKELEHNGYKELYTNTYIAPDVLFSKNIDIEHIVPKARVFDDSFSNKTLAFKDFNIKKGESTAFDYITSLKNEEKLNQYLARVENAYKTKNISPAKYKNLLKKASEIGDGFINRDLRDTQYIAKKAKEILFQVTKNVLSTSGSITDRLREDWSLVDVMKELNMPKYQSLGLTEVEERKDGNKVTVIKDWTKRNDHRHHAMDALTVAFTKPSYIQYLNHLNARKDENNKNYSVILAIEKKETIKVPTNNGKNKRVFIEPIPNFRQVAKKHLEEIFISHKAKNKVVTKNTNKPAGTNKQQITLTPRGQLHKETIYGKYQYYVNKEEKVGVKFDKETIAKVSNPLYREALLKRLQANDNDPKKAFTGKNALSKNPIYLDEAKTKTLPEKVNLTYLEEDFSVRKKIVPKNPTSKEFVPNLKSIEKVVDEGVRNILIERLRVYNNDPEKAFVDLEKNPIWLNKEKGIAIKRVTISGVNNAQPLHIGKDHLGKTTLNKEGKEIPVDYVSTGNNHHVAIYRDKEGNLQEQIVSFFEAVVRTQQGLPIIDKTYKQEEGWQFLFTMKQNEMFVFPNEATGFNPAEIDLLDPKNKKQISPNLFRVQKIATKDYFFRHHLETNVETDNVLKNTTWKREGLSGLKDIVKVRINHLGDIVSIGEY

SEQ ID NO: 385 - protein, 1426 aa, Capnocytophaga sp.
MKNILGLDLGTTSIGFTHIVEDENKEKSEIKELGVRIVSLTTDEQSDFEKGKSISTNANRTLKHGARLNLDRYQQRRKFLIDLLQKANLITSSSILAENGKNTTHSTWQLRAKAVTERIEKEEFARVLLAINKKRGYKSSRKAKTEDEGQAIDGMAIAKRLYDENLTPGQLSLQLLQQNKKLLPDFYRSDLQKEFDLVWNFQKQFYPDILTDSFYKELQGKGKDATSKAFSKRYHFDTAENKGSRESVRLQAYQWRAEAISKQLSKEEVAYVLTEINNNLNNASGYLGAISDRSKELYFNRQTVGQYLYAQLQENKHNSLKNKVFYRQDYLDEFERIWETQASFHKELTEELKKQIRDVVIFYQRKLKSQKGLISFCEFESKEIEIEKDGKTITKSIGARVVPKSSPLFQEFKIWQILNNVTCKRKGIRKKKSSAKSTELDLFNEPSQTIFSLDMECKQLLFEELNLKGDLKSDKVLKLLGYSPQEWEINYNQLEGNRTQKALYEAYLKIVEMEAHDVKDILQIKSTKDDWALEESPLSASEIRERVKAIFQTLGICTKILYFDPLLPVKEFEEQDSYQLWHLLYSYESDDSTSGNETLYRILEKKYAFKREHATILANVTLQDDYGSLSTKAIRKIYPYIKENQYSTACEKAGYKHSKLSLTTEELEARELKNIIPLLKKNALRNPVVEKILNQMINVVNALIEKNSERDAEGKITKYFHFDEIRIELARELKKNAQERYEMTQNINKAKLEHQKISGILQKEFGIKNPTKSDITRYRLYQELAHNGYNDLYTNTYIPKELLFSKNIDIEHIVSKARVFDDSFSNKTLAFREFNIKKGESTAFDYITSLNNEEELNQYLNRVENAYKTKNISPAKYKNLLKKASEIGDGFINRDLRDTQYIAKKAKEILFQVTKNVLSTSGSITDRLREDWGLVDVMKELNMPKYQSLGLTEVEERKEGNKVTVIKNWTKRNDHRHHAMDALTVAFTKPSYIQYLNHLNARKDKNNKNYSVILAIEEKETIKVPTNNGKNKRVFIEPIPNFRQVAKKHLEEIFISHKAKNKVVTKNTNKPAGTDKQQITLTPRGQLHKETVYGKYQYYVNKEEKIGVKFDKETIAKVSNPVYREALLKRLQANDNDPKKAFAGKNALSKNPIYLDEAKTKTLTEKVNLTYLEEDFSIRKDISPDNFKDLKSIEKVIDQGVKRILIKRLQDYDNDPKKAFVDLEKNPIWLNKEKGIAIKRVTISGVNNAQPLHIGKDHLGKTTLNKEGKEIPVDYVSTGNNHHVAIYRDKEGNLQEQIVSFFEAVVGAQQGLPIVDKTYKQAEGWQFLFTMKQNEMFVFPNEATGFNPAEIDLLDPKNKKQISPNLFRVQKIATKDYFFRHHLETNVDTDNVLKNTTWKREGLSGLKDIVKVRINHLGDIVSIGEY

SEQ ID NO: 386 - protein, 1450 aa, Capnocytophaga sp.
MKRILGLDLGSNSIGWAFVEQDFENKQGKIIATGSRIIPMDQGILGDFEKGNTVSQTAERTTYRSMRRLRERHLLRRERLHRVLHILGFLPPHYDAQIDFTKRYGKFIDNAEPKIAYNNGNFIFMNSFNEMIEDFKKYQPQLFYKKSNGEESKIPYDWTIYYLRKKVLSQKITQQELAWLILHFNQKRGYYQLRGEEETENPNKEVAFHSLKVVDVEAEAPNKKGEIWYTIRLENGWIYRRTSKIPLDDWKGKTRDFIVTTDLNDDGTIKVDKEGKEKRSFRAPDENDWNLLKKKTEHDIDFSGKTVGAYIYDHLLQNPNQKIKGKLVRTIERKYYKDELKAILAKQIALQPELFTETLLADCIRELYRKNETQQQNLLSKDFLHLFVEDIIFYQRPLRSKKSTIANCTLEKRSYIDKETNERKDTFIKVCAKSNPYYQEFRVLQWLQNLRIYEIETDREVTAEFIETAEDYEALFNFLMSQKEIDNEGLLKYFLFAKNPQIKDKVAKSELKKWLTTYRWNYVYDAADNSSKKYPMNETGYDLQRYLQKVEGLPANFLTFDITYRLWHLLYSVKDKVEFEKALKKFAQEYQLDEASFVDSFKNFKPYPNEYGSFSEKAIKKLLPLMRFGNHWDFNRIDVSTQKRIDDLINGVANDEIRTIIREKAEKYQLNSESCFQGLPLWLAQYVVYNRHAEATDIEKWTSVSDLETYLEDFKQHSLRNPIVEQVVTETLRVVRDIWQQYGGGQANFFDEIHIELGRELKKTAEERKQLSNRNQENENTNLRIKKLLAELKEDASIQNVRPYSPVQQELLKIYEEGVFSSTDQVEEDIQKIRKKAEPTTPEIQRYKLWLEQKYKSPYTGEVISLTKLFTEEYEIEHIIPQSRYYDDSLSNKVICESAVNKLKTNQLGLEFIQNHHGEKVRITGNKEVTIFTEEQYKEFVKKHYANNSAKQQKLLLNEIPEKMVARQLNDTRYISKYISEILSKIVRSDEKDEGVNSKNVIPCTGKITTALKQDWGLNDVWNELILPRFERMNQLTQTQLFTSYNDRFQKNLPTVPIEYSQGFQKKRIDHRHHAMDALVIACATREHINYMNNQHALDKNKDKKEKQQSRIDLRTILCEKKNNNWQFKKPWSTFTQETKEALEHIVVSFKQNLRVINKATNYYEKWEEKNGVLVKKKVKQEGTNWAIRKPLHKETVSGKIVLDRKIGKDKILTATRKEVDITFTEKIISSITDTGIQKILLNYLNYKGSPEVAFSAEGLEELNKNIAQYNDGKKHQPIYKVRIFEEGSKFPLGETGAKATKFVEAAKGTNLFFGVYQGKEKRSYATIPLNEVIERQKQGLPSVPERNEKGEPLLFSLSPNDLVYVPMEGEIAETIDFNNLSKEQKERIYKTVSFTGNQCFFVQEAVATPIVNKMEYSPLNKMERDILGTMIKEVCIKLKVDRLGNITKA

SEQ ID NO: 387 - protein, 1437 aa, Capnocytophaga sp.
MKYIKYILGLDIGSNSIGWALIQLDLLQKTKRIIATGSRIIPMDQKVLSDFGKGITISPTAQRTSYRNARHCRERHLLRRERLHRVLHILGFLPTHYDKQIDFSKRYGKFVDNTEPKIAYNERKFLFMDSFQEMLADFKIHQPDLFYTKKNGEESKIPYDWTIYYLRKKALSRKISKEELAWIILNFNQKRGYYQLREEEEENKENDFEIISSKIISVIKKDKDKKYNKYWYDIILENGLVYQAAFYNDFVYNWINQDREFIIERISLKNGTEKVKLSYLPTFDEIDKMDKKEQDKYYKKIKIKTENSIGNKTVGCYIYDHILQNPNEKIKGKLVRTIERKYYKEELKAILEKQVALQPELFTDQLFADCIRELYSKNEAQQRNLAARDFVHLFVEDIIFYQRSLRRQKSTLANCSLESRSYIDKDSHTRKEAPLKVCPKSNPYYQEFRVLQWLQNLKIYEIDTDQEVTHEFIKTLEDKQQFFDFLMNQKEIDCEELLKYFLNQTYPNAREKALKSELKKWKDTYRWNYVYDIGEKSSKKYPMNETRYELKRHLEKVANLPDDFLSSEVEYLLWHLIYSVKDKVAYEKGLKTFAQKHHLDKDSFVESFKKFKPYPSEYGSFSEKAIRKLLPLMRFGSYWDFNHIDKNTQKRIEDLITGVENEEIRTILREKAEKYQLEKETDFQDLPLWLAQYIVYNRHAEASSLEKWTSVNDLETYLNEFKQYSLRNPIVEQVVMETLRVVRDIWQQYGQGQASFFDEIHIELGRELKKTAKEREKLSKQNQKNEDINLSIKEKLKELEKYNTRAYSITHQEKYKLWLEQKHISPYTGQIISPENLFTDNYEIEHIIPQSRFFDDSLSNKVVCESIVNKAPYKDRQLGLEFIKNQGGRIVKELSTENKTIKIFTEEQYRTFIKEHYSNNPEKTKKLLLEEIPEKMVARQMNDTCYISKFISEILSKIVRSDEQDEGVHSKNVILCTGKITSALKQDWGVNDVWNDLILPRFERMNDLTQSTLFTTYNEKYQKYLPTVPMEYSNGFQKKRIDHRHHAMDAIIIACATREHINYINNQHALEKGKDKKEKQKEHDKLREKLCIKKDNKGSEENYSWIFKKPWDTFTQEVQAALEGIVVSFKQNLRVINKATNYYERWVEENGKYIKKMVKQEGTNWAIRKPLHEETISGKIYLDREEITKNDILTATRKTVDSSFDEKRIKKITDTGIQKILLNYLKYKGSPEIAFSPEGLEELNKNLSIYNDGKPHKPIYKVRIYEKGSGRFALGEKGRKYKKYVQGAPNLYFGIYQGANKRSFATIPLNEVIERQKQGRPSIPEYNEKGDPLLFSLSPNDLVYVPVEGEIIEDIDFQNLSKEQKERIYNVNDFSSTCYFTPNRIAKAIFPKEVDLQRKGDKLPGSYDTKTASLEGIQIKEVCIKLKIDRLGNISKA

SEQ ID NO: 388 - protein, 1140 aa, Catellicoccus marimammalium
MKNMTKVNVGLDVGISSAGWSVINAETNQILESGVRLFSGSDADENVNRRNQRQGRRLFRRRKLRIQEAKKYLENVFQLKDIEPKDEWNPYEIRVRALNEKVSKEELSIALLNIVKHRGISYELEDVTDEEGTNTQSFQSGLDYNRRLLKTKTVGEIQYDRLQKYGQVRGQIQTEDGLLINIFPTKNYVEEVERILETQKKYHPEIDDVFIEKIISFVTRKREYFVGPGNEKSRTDYGIYRENGETLDNLFEILIGKDKFYPEEYRAAGSSYTAQIFNLLNDLNNLRIPTTEDHHLTKAQKEEIITELKNTSRLSGGMLKLISKVTKAPKEEISGYRKDEKDKPDLHSLAYYRKQKNMLEKEGIQIADFSEELLDELATMMTLNTEPGEIRKQLNKITNQYDILTPEVIEVLVKNHTAFVATSNHKWHRFSLKLMKEFIPELLETSKEQSTILCERGFIQNRASYLDENHHFNYAELRENLYNPVVRKSTCEMLKVFTAIQEKYPNIQNVIVELPRETNEDEQKRKIKKINDNNAKRKKEILKEAQAQSGLSEEALEEKLLKTKGLYLKLMLWYEQEGKCVYSGQEIPLSDLLQNKGGYEVDHIIPISISFDDRLCNKVLVRQQLNSQKSNQTPFEYMTTHTDGHLSFHELKELVGKNKRFSKEKRELLLAEIYSNDIETRKRFINRNLVDTSYTARIVLNALQQYKKENQLSMNVSVVRGAMTNILRKKVKLDKTRETFHHHAIDASLMAVIPNIEFFKERKEWLPKSANEEVVEVEVSEEETMPEKEFKVKMRLPESFIQDVQILQRNSFAKEEVSGPQTRERNLKIKFSHQVDQKMNRKVADDTIYGTRQAQLGKDKKEETYVIGKIKDIYNYDEYVRFKKRYDKNKESFLMYHHDPQTFEKLEEILAQYPEYIEDEKGKKKKVSPFALYREENGPVTKYAKKNNGPVIKQLKYYDSKLNRKIDISHKYSTKNRQVVLQSLKPYRTDVYRNQDTGEYTLVGIDQNDGKFVNGHYGIPKSRYEEIKANNKLSEHDEFVFSLYKNSMVKVIDENGESIVVRYLSRSMPNRKNNAEIKPVEKYQFEDGEVVPVYGKCRKQMQTVFVKKGWTLLKGNTDILGNTYFVEKESENPKKMIDDK

SEQ ID NO: 389 - protein, 1419 aa, Chryseobacterium sp.
MMIKNILGLDLGTNSIGWALIKQNFENKYGEILGMGSRIIPMSQDVLGEFGKGNSVSQTAARTGYRGVRRLRERFLLRRERLHRVLNVLNFLPEHYASQIDFEKRFGKFKYETEPKLAYNNDGFFFKNSFDEMLGDFKDHQFHLLENGRKVPYDWTIYYLRKKALSQKIEKEELAWILLNFNQKRGYYQLRGEDFEEEKDRVFVRLKVDRVVDSGENIKGKILYDVYFENGWKYEKQIVKTEDWIGRTKEFIVTESILKNGDTKRTFKAVDSEKDWIAIKTKTEQEIDKSHKTVGAYIYEALLQNPKQKIKGKLVRTIERKFYREELKKILERQKEFHPELQSDDLYNDCIRELYRNNEAHQITLSKKDFVHLLLNDLIFYQRPLRSQKSSVSNCTLEFRKYKDENGVEHAQYLKTIPKSNPYYQEFRVWQWMFNLNIYRKDDDTNVTKEFLSSTEDYETLFEFLNNRKEVDQKALLRHFKLNEKTHRWNYVEDKKYPCNETKTMISTRLEKVENYPSDFLTREMEQNIWHIIYSVNDKIEYEKALKSFAHKNNLDENSFFEAFKKFPPFKSEYGSFSEKAIKKLLPLLRLGKYWNWESIDRKSQGRIEKIITGEFDGNIKDKVREKAIHLTAENDFQGLQLWLAQYIVYGRHSEASMIGKWNSADDLEEFLKGFKQHSLRNPIVEQVITETLRVVKDIWLKYGNGAKDFFSEIHIELGREMKQTKDERVDATKRITENENTNLRIKALLAEMMNDNSVENIRPYSPMQQEILKIYEDGILKSDIEIDDDILKISKTAQPSSSDLKRYKLWLEQRYKSPYTGQIIPLNKLFTSEYEIEHIIPQSRYFDDSFSNKIICESAVNKLKDNYIGLGFIKQFGGMIVECGFGKSVEIFKAEEYEDFVKKHYANNRSKRNKLLLEEIPEKMIDRQLNDTRHISKYISGVLSNIVRQEDGTDEGVNSKNIVPGNGKITTQLKQDWGLNDVWNELILPRFERMNQLTNSTDFTSWNKNHQKFLPTVPIEFSKGFSKKRIDHRHHAMDALVIACATKDHINLLNNQSAKSDTKRYDLKRKLMKFERVVYSHSKTGEKIEKEVPKQFLKPWDNFTVDAKNKMETIIVSFKQNLRVINKATNHYEKWIEKDGIKRKELIKQEGTNWAIRKPMHKETVSGKVDLPGIKIPKGKILTATRKSLDTSFDLKTINSITDTGIQKILKNYLEFKGSSELAFSPEGIEDMNKNIEKFNDGKPHQSINKVRIFELGSKFSVGQTGNKKDKYVEAAKGTNLFFAVYEDKNGKRSYETIPLNEVIERQKQGLDSVSFKNKEDFLLCPNDLVYVPSEDELENIYNIDFKNLTTEKTGNIYKVVSFSGNQIFFIRQDIAISIVNKAEFSTLNKMERAIDGSMIKENCIKLKIDRLGNIAKI

SEQ ID NO: 390 - protein, 1065 aa, Clostridium perfringens
MNKDINYALGLDIGITSVGWAVINLDLNRIEDLGVRIFNAAENPKDGSSLALPRRLARGRRRLLRRKAYRVERVRKLIVKNNILTKEELEGLFKNKEVIDVWEARVKGLDYKLSREEWAKILINFCKRRGFKSNRKNETKDKEAGQILSSISYNIEKMKETNSRTIGEYIYNEVKNSDDSYAPLRNKFGEYKMCVSRDVLREEIHTLFEKQRELGNNFASDEIEDKYFEIFNSQRPFSNFEDLEKLVGFCTFERKKHKRAPKHCISSEEFTLYEGINKLSIIKDGEKRKLSEEERTLVVNEAFNKKEIKYTTLRKLLGLSEDELFSTLTYSIDKDISKTENTKFVSLKGYHEIKRAIEKGVSKKAWQDIENNRNLLNDIAYVLTLGKTDDEIEKQLRLRNVPEELFESLLDMSFSKFNNLSIYALEKILPFMKEGYQYNEACEKAGYNFKAIYEGVRTKKLPVIEIDEIVNPVVNRALAQTRKVINSVIDKYGSPVRINIELARDLAKNFKDRKLIEKEQKENRANLDKIRENLRELMDKEPTAVEVLKYRLWEQQRGECAYTQSQIALERLFSPGYCEIDHIIPFSRSFDDSLSNKILVLGSENQRKGNKIPYEYFGEDSERWNSFEIWVKGSYLNYKKKANLLKKKFTEEEQRDWKARNLQDTKYICRYISNFVNNRLEFKESENKQKVITVNGRATAYLRSRWGLNKVREDGDKHHALDAAVVGVTTQGMVQKISKYSKAHELYTVRKNDEFVDVETGECVDVDEYKEIRKDILPRPWRGFSEELKLRLSDNPLEELKKLPIETYNEEFIKENVKPIFVSRVPFRKISGKLFKETIYSERAFKDGYFVSKKSLVDLKRGDLDNFYNYECDKKLYDAISERMKEFNYNGKKAFESPFRKPTKSGKEGPVVRSVKIKSAAPFKDGIPMNEGLVAKEGMVRIDIYEKEGKYFVVPVYRYQLAKGIVPKRAAIAGKSELKWPIMDQTYNFKFSIFKNDLIEIKYAKKDGYFGYYDGFDRHTASLVIENHDNSDRYRGIGVKTGVVEFNKYEVDVLGNYHKVNLGGN

SEQ ID NO: 391 - protein, 1099 aa, Corynebacterium accolens
MSLSYRVGIDVGTYSLGCTAIEVDDNDQPVNILSSVSLIHDSGLDPDQQKRAVTRLASSGVARRTRRLYRRRRRRMINLEKFLTSQGWETRPFEHYSDPYLPWNARVALVNGYISDDAQRGMYLSIAFRHIANHRGWRNPYWKVSSLYSPDKPSDAFEQIRKELEESTGHKIPETVTVGQLISFAQFGKDRLRGGGKKKDEKKPQEQVNQAVISARLHQIDHAREINEICRVQKIDDALRKQILDLVFAAESPKGAQIGRVGKDPLQPKLPRALKASDAFQQYRIVALAGNLRIYRDGVSTPLDRDEKLIVFNYLINLSHKEEPSWLKVAEVLNIDRGQLHGTATMTDDGERAGAAPPVHDTNRTILGCKIKPLVHWWEGANDDERAAMLKALSNSEVEDFDSPAGAQTQAFFANLDESEQEKLDSLHLPIGRAAYSEDTLMRLTSRMLDENLDLYEARLAEFDIPKDWAPPAPRIGEPVGNPAVDRVLKGVARWLEAAADEWGAPKSVVIEHVRDGFISKSKANEIDRANNARHKRNRELFKQMQENLGIDGKLRSSDLWRYQSVQRQNCQCAYCGSPITYTTCEMDHIVPRAGEGSTNTRDNLVATCHRCNLAKKNIPFAVWAAQTNIPGVSVKEALDRTRHWSEDSGMTSKDFKKFRKNVCDRLKRTVVDEPLDARSMESVAWMANELRGRVAQRFQEENTVVNVYRGELTAEARRAAGISDKLRFIDGTGKSRLDRRHHAVDAAVVAFTQNYVAETLAIRSNKKREAQLLQAAEQWKEFTGSDAEHRAAWNAWLPKMQKLAVLLQKALDEDRIAVTSNLRLRLGNGRAHEDSIGELKTIRVGDAISVTDIDRASSEALWCALTREPDFDENNGLPENPDRRIRIHGTWYDAEDDIEVFPVGAGAIKVRGGYAELSRFHHARIYKIPGKKAPVYCMLRVYNADLIRHRHEDLFSVEIKPQTMSVRQAEPKLRKALAENTAEYLGWLVTDDELVIDTSNFNTGQIAEMQSELGQVRRWRLDGFYSPSTLRLRPLQMSAEGLREDTSIGAKKIIDRPGWLPAINKLFGEGHVTVVRRDALGRARLTSNAHLPISWKAE

SEQ ID NO: 392 - protein, 1084 aa, Corynebacterium diphtheriae
MKYHVGIDVGTFSVGLAAIEVDDAGMPIKTLSLVSHIHDSGLDPDEIKSAVTRLASSGIARRTRRLYRRKRRRLQQLDKFIQRQGWPVIELEDYSDPLYPWKVRAELAASYIADEKERGEKLSVALRHIARHRGWRNPYAKVSSLYLPDGPSDAFKAIREEIKRASGQPVPETATVGQMVTLCELGTLKLRGEGGVLSARLQQSDHAREIQEICRMQEIGQELYRKIIDVVFAAESPKGSASSRVGKDPLQPGKNRALKASDAFQRYRIAALIGNLRVWVDGEKRILSVEEKNLVFDHLVNLTPKKEPEWVTIAEILGIDRGQLIGTATMTDDGERAGARPPTHDTNRSIVNSRIAPLVDWWKTASALEQHAMVKALSNAEVDDFDSPERAKVQAFFADLDDDVHAKLDSLHLPVGRAAYSEDTLVRLTRRMLSDGVDLYTARLQEFGIEPSWTPPTPRIGEPVGNPAVDRVLKTVSRWLESATKTWGAPERVIIEHVREGFVTEKRAREMDGDMRRRAARNAKLFQEMQEKLNVQGKPSRADLWRYQSVQRQNCQCAYCGSPITFSNSEMDHIVPRAGQGSTNTRENLVAVCHRCNQSKGNTPFAIWAKNTSIEGVSVKEAVERTRHWVTDTGMRSTDFKKFTKAVVERFQRATMDEEIDARSMESVAWMANELRSRVAQHFASHGTTVRVYRGSLTAEARRASGISGKLEFLDGVGKSRLDRRHHAIDAAVIAFTSDYVAETLAVRSNLKQSQAHRQEAPQWREFTGKDAEHRATWRVWCQKMEKLSALLTEDLRDDRVVVMSNVRLRLGNGSAHEETIGKLSKVKLGSQLSVSDIDKASSEALWCALTREPDFDPKDGLPANPERHIRVNGTHVYAGDNIGLFPVSAGSIALRGGYAELGSSFHHARVYKITSGKKPAFAMLRVYTIDLLPYRNQDLFSVELKPQTMSMRQAEKKLRDALATGNAEYLGWLVVDDELVVDTSKIATDQVKAVEAELGTIRRWRVDGFFGDTRLRLRPLQMSKEGIKKESAPELSKIIDRPGWLPAVNKLFSEGNVTVVRRDSLGRVRLESTAHLPVTWKVQ

SEQ ID NO: 393 - protein, 1084 aa, Corynebacterium diphtheriae
MKYHVGIDVGTFSVGLAAIEVDDAGMPIKTLSLVSHIHDSGLDPDEIKSAVTRLASSGIARRTRRLYRRKRRRLQQLDKFIQRQGWPVIELEDYSDPLYPWKVRAELAASYIADEKERGEKLSVALRHIARHRGWRNPYAKVSSLYLPDGPSDAFKAIREEIKRASGQPVPETATVGQMVTLCELGTLKLRGEGGVLSARLQQSDHAREIQEICRMQEIGQELYRKIIDVVFAAESPKGSASSRVGKDPLQPGKNRALKASDAFQRYRIAALIGNLRVRVDGEKRILSVEEKNLVFDHLVNLAPKKEPEWVTIAEILGIDRGQLIGTATMTDDGERAGARPPTHDTNRSIVNSRIAPLVDWWKTASALEQHAMVKALSNAEVDDFDSPEGAKVQAFFADLDDDVHAKLDSLHLPVGRAAYSEDTLVRLTRRMLADGVDLYTARLQEFGIEPSWTPPAPRIGEPVGNPAVDRVLKTVSRWLESATKTWGAPERVIIEHVREGFVTEKRAREMDGDMQRRAARNAKLFQEMQEKLNVQGKPSRADLWRYQSVQRQNCQCAYCGSPITFSNSEMDHIVPRAGQGSTNTRENLVAVCHRCNQSKGNTPFAIWAKNTSIEGVSVKEAVERTRHWVTDTGMRSPDFKKFTKAVVERFQRATMDEEIDARSMESVAWMANELRSRVAQHFASHGTTVRVYRGSLTAEARRASGISGKLKFFDGVGKSRLDRRHHAIDAAVIAFTSDYVAETLAVRSNLKQSQAHRQEAPQWREFTGKDAEHRAAWRVWCQKMEKLSALLTEDLRDDRVVVMSNVRLRLGNGSAHKETIGKLSKVKLGSQLSVSDIDKASSEALWCALTREPDFDPKEGLPANPERHIRVNGTHVYAGDNIGLFPVSAGSIALRGGYAELGSSFHHARVYKITSGKKPAFAMLRVYTIDLLPYRNQDLFSVELKPQTMSMRQAEKKLRDALATGNAEYLGWLVVDDELVVDTSKIATDQVKAVEAELGTIRRWRVDGFFSPSKLRLRPLQMSKEGIKKESAPELSKIIDRPGWLPAVNKLFSDGNVTVVRRDSLGRVRLESTAHLPVTWKVQ

SEQ ID NO: 394 - protein, 1084 aa, Corynebacterium diphtheriae
MKYHVGIDVGTFSVGLAAIEVDDAGMPIKTLSLVSHIHDSGLDPDKIKSAVTRLASSGIARRTRRLYRRKRRRLQQLDKFIQRQGWPVIELEDYSDPLYPWKVRAELAASYIADEKERGEKLSVALRHIARHRGWRNPYAKVSSLYLPDEPSDAFKAIREEIKRASGQPVPETATVGQMVTLCELGTLKLRGEGGVLSARLQQSDHAREIQEICRMQEIGQELYRKIIDVVFAAESPKGSASSRVGKDPLQPGKNRALKASDAFQRYRIAALIGNLRVRVDGEKRILSVEEKNLVFDHLVNLAPKKEPEWVTIAEILGIDRGQLIGTATMTDDGERAGARPPTHDTNRSIVNSRIAPLVDWWKTASALEQHAMVKALSNAEVDDFDSPEGAKVQAFFADLDDDVHAKLDSLHLPVGRAAYSEDTLVRLTRRMLADGVDLYTARLQEFGIEPSWTPPAPRIGEPVGNPAVDRVLKTVSRWLKSATKTWGAPERVIIEHVREGFVTEKRAREMDGDMRRRAARNAKLFQEMQEKLNVQGKPSRADLWRYQSVQRQNCQCAYCGSPITFSNSEMDHIVPRAGQGSTNTRENLVAVCHRCNQSKGNTPFAIWAKNTSIEGVSVKEAVERTRHWVTDTGMRSTDFKKFTKAVVERFQRATMDEEIDARSMESVAWMANELRSRVAQHFASHGTTVRVYRGSLTAEARRASGISGKLEFLDGVGKSRLDRRHHAIDAAVIAFTSDYVAETLAVRSNLKQSQAHRQEAPQWREFTGKDAEHRAAWRVWCQKMEKLSALLTEDLRDDRVVVMSNVRLRLGNGSAHEETIGKLSKVKLGSQLSVSDIDKASSEALWCALTREPDFDPKDGLPANPERHIRVNGTHVYAGDNIGLFPVSAGSIALRGGYAELGSSFHHARVYKITSGKKPAFAMLRVYTIDLLPYRNQDLFSVELKPQTMSMRQAEKKLRDALATGNAEYLGWLVVDDELVVDTSKIATDQVKAVEAELGTIRRWRVDGFFGDTRLRLRPLQMSKEGIKKESAPELSKIIDRPGWLPAVNKLFSEGNVTVVRRDSLGRVRLESTAHLPVTWKVQ

SEQ ID NO: 395 - protein, 1084 aa, Corynebacterium diphtheriae
MKYHVGIDVGTFSVGLAAIEVDDAGMPIKTLSLVSHIHDSGLDPDKIKSAVTRLASSGIARRTRRLYRRKRRRLQQLDKFIQRQGWPVIELEDYSDPLYPWKVRAELAASYIADEKERGEKLSVALRHIARHRGWRNPYAKVSSLYLPDEPSDAFKAIREEIKRASGQPVPETATVGQMVTLCELGTLKLRGEGGVLSARLQQSDHAREIQEICRMQEIGQELYRKIIDVVFAAESPKGSASSRVGKDPLQPGKNRALKASDAFQRYRIAALIGNLRVRVDGEKRILSVEEKNLVFDHLVNLAPKKEPEWVTIAEILGIDRGQLIGTATMTDDGERAGARPPTHDTNRSIVNSRIAPLVDWWKTASALEQHAMVKALSNAEVDDFDSPEGAKVQAFFADLDDDVHAKLDSLHLPVGRAAYSEDTLVRLTRRMLADGVDLYTARLQEFGIEPSWTPPAPRIGEPVGNPAVDRVLKTVSRWLESATKTWGAPERVIIEHVREGFVTEKRAREMDGDMRRRAARNAKLFQEMQEKLNVQGKPSRADLWRYQSVQRQNCQCAYCGSPITFSNSEMDHIVPRAGQGSTNTRENLVAVCHRCNQSKGNTPFAIWAKNTSIEGVSVKEAVERTRHWVTDTGMRSTDFKKFTKAVVERFQRATMDEEIDARSMESVAWMANELRSRVAQHFASHGTTVRVYRGSLTAEARRASGISGKLEFLDGVGKSRLDRRHHAIDAAVIAFTSDYVAETLAVRSNLKQSQAHRQEAPQWREFTGKDAEHRAAWRVWCQKMEKLSALLTEDLRDDRVVVMSNVRLRLGNGSAHEETIGKLSKVKLGSQLSVSDIDKASSEALWCALTREPDFDPKDGLPANPERHIRVNGTHVYAGDNIGLFPVSAGSIALRGGYAELGSSFHHARVYKITSGKKPAFAMLRVYTIDLLPYRNQDLFSVELKPQTMSMRQAEKKLRDALATGNAEYLGWLVVDDELVVDTSKIATDQVKAVEAELGTIRRWRVDGFFGDTRLRLRPLQMSKEGIKKESAPELSKIIDRPGWLPAVNKLFSEGNVTVVRRDSLGRVRLESTAHLPVTWKVQ

SEQ ID NO: 396 - protein, 1084 aa, Corynebacterium diphtheriae
MKYHVGIDVGTFSVGLAAIEVDDAGMPIKTLSLVSHIHDSGLDPDKMKSAVTRLASSGIARRTRRLYRRKRRRLQQLDKFIQRQGWPVIELEDYSDPLYPWKVRAELAASYIADEKERGEKLSVALRHIARHRGWRNPYAKVSSLYLPDEPSDAFKSIREEIKRASGQPVPETATVGQMVTLCELGTLKLRGEGGVLSARLQQSDHAREIQEICRMQEIGQELYRKIIDVVFAAESPKGSASSRVGKDPLQPGKNRALKASDSFQRYRIAALISNLRVRVDGEKRILSVEEKNLVFDHLVNLAPKKEPEWVTIAEILGIDRGQLIGTATMTDDGERAGARPPTHDTNRSIVNSRIAPLVDWWKTASALEQHAMVKALSNAEVDDFDSPEGAKVQAFFADLDDDVHAKLDSLHLPVGRAAYSEDTLVRLTRRMLADGVDLYTARLQEFGIEPSWTPPAPRIGEPVGNPAVDRVLKTVSRWLESATKTWGAPERVIIEHVRDGFVTEKRAREMDGDMRRRAARNAKLFQEMQEKLNVQGKPSRADLWRYQSVQRQNCQCAYCGSPITFSNSEMDHIVPRAGQGSTNTRENLVAVCHRCNQSKGNTPFAIWAKNTSIEGVSVKEAVERTRHWVTDTGMRSTDFKKFTKAVVERFQRATMDEEIDARSMESVAWMANELRSRVAQHFASHGTTVRVYRGSLTAEARRASGISGKLEFLDGVGKSRLDRRHHAIDAAVIAFTSDYVAETLAVRSNLKQSQAHRQEAPQWREFTGKDAEHRAAWRVWCQKMEKLSALLTEDLRDDRVVVMSNVRLRLGNGSAHEETIGKLSKVKLGSQLSVSDIDKASSEALWCALTREPDFDPKDGLPANPERHIRVNGTHVYAGDNIGLFPVSAGSIALRGGYAELGSSFHHARVYKITSGKKPAFAMLRVYTIDLLPYRNQDLFSVELKPQTMSMRQAEKKLRDALATGNAEYLGWLVVDDELVVDTSKIATDQVKAVEAELGTIRRWRVDGFFGDTRLRLRPLQMSKEGIKKELAPELSKIIDRPGWLPAVNKLFSEGNVTVVRRDSLGRVRLESTAHLPVTWKVQ

SEQ ID NO: 397 - protein, 1084 aa, Corynebacterium diphtheriae
MKYHVGIDVGTFSVGLAAIEVDDAGMPIKTLSLVSHIHDSGLDPDKMKSAVTRLASSGIARRTRRLYRRKRRRLQQLDKFIQRQGWPVIELEDYSDPLYPWKVRAELAASYIADEKERGEKLSVALRHIARHRGWRNPYAKVSSLYLPDEPSDAFKSIREEIKRASGQPVPETATVGQMVTLCELGTLKLRGEGGVLSARLQQSDHAREIQEICRMQEIGQELYRKIIDVVFAAESPKGSASSRVGKDPLQPGKNRALKASDAFQRYRIAALIGNLRVRVDGEKRILSVEEKNLVFDHLVNLAPKKEPEWVTIAEILGIDRGQLIGTATMTDDGERAGARPPTHDTNRSIVNSRIAPLVDWWKTASALEQHAMVKALSNAEVDDFDSPEGAKVQAFFADLDDDVHAKLDSLHLPVGRAAYSEDTLVRLTRRMLADGVDLYTARLQEFGIEPSWTPPAPRIGEPVGNPAVDRVLKTVSRWLESATKTWGAPERVIIEHVREGFVTEKRAREMDGDMRRRAARNAKLFQEMQEKLNVQGKPSRADLWRYQSVQRQNCQCAYCGSPITFSNSEMDHIVPRAGQGSTNTRENLVAVCHRCNQSKGNTPFAIWAKNTSIEGVSVKEAVERTRHWVTDTGMRSTDFKKFTKAVVERFQRATMDEEIDARSMESVAWMANELRSRVAQHFASHGTTVRVYRGSLTAEARRASGISGKLEFLDGVGKSRLDRRHHAIDAAVIAFTSDYVAETLAVRSNLKQSQAHRQEAPQWREFTGKDAEHRAAWRVWCQKMEKLSALLTEDLRDDRVVVMSNVRLRLGNGSAHEETIGKLSKVKLGSQLSVSDIDKASSEALWCALTREPDFDPKDGLPANPERHIRVNGTHVYAGDNIGLFPVSAGSIALRGGYAELGSSFHHARVYKITSGKKPAFAMLRVYTIDLLPYRNQDLFSVELKPQTMSMRQAEKKLRDALATGNAEYLGWLVVDDELVVDTSKIATDQVKAVEAELGTIRRWRVDGFFGDTRLRLRPLQMSKEGIKKESAPELSKIIDRPGWLPAVNKLFSEGNVTVVRRDSLGRVRLESTAHLPVTWKVQ

SEQ ID NO: 398 - protein, 1084 aa, Corynebacterium diphtheriae
MKYHVGIDVGTFSVGLAAIEVDDAGMPIKTLSLVSHIHDSRLDPDKIKSAVTRLASSGIARRTRRLYRRKRRRLQQLDKFIQRQGWPVIELEDYSDPLYPWKVRAELAASYIADEKERGEKLSVALRHIARHRGWRNPYAKVSSLYLPDEPSDAFKAIREEIKRASGQPVPETATVGQMVTLCELGTLKLRGEGGVLSARLQQSDHAREIQEICRMQEIGQELYRKIIDVVFAAESPKGSASSRVGKDPLQPGKNRALKASDAFQRYRIAALIGNLRVRVDGEKRILSVEEKNLVFDHLVNLAPKKEPEWVTIAEILGIDRGQLIGTATMTDDGERAGARPPTHDTNRSIVNSRIAPLVDWWKTASALEQHAMVKALSNAEVDDFDSPEGAKVQAFFADLDDDVHAKLDSLHLPVGRAAYSEDTLVRLTRRMLADGVDLYTARLQEFGIEPSWTPPAPRIGEPVGNPAVDRVLKTVSRWLESATKTWGAPERVIIEHVREGFVTEKRAREMDGDMRRRAARNAKLFQEMQEKLNIQGKPSRADLWRYQSVQRQNCQCAYCGSPITFSNSEMDHIVPRAGQGSTNTRENLVAVCHRCNQSKGNTPFAIWAKNTSIEGVSVKEAVERTRHWVTDTGMRSTDFKKFTKAVVERFQRVTMDEEIDARSMESVAWMANELRSRVAQHFASRGTTVRVYRGSLTAEARRASGISGKLEFLDGVGKSRLDRRHHAIDAAVIAFTSDYVAETLAVRSNLKQSQAHRQEAPQWREFTGKDAEHRAAWRVWCQKMEKLSALLTEDLRDDRVVVMSNVRLRLGNGSAHEETIGKLSKVKLGSQLSVSDIDKASSEALWCALTREPDFDPKDGLPANPERHIRVNGTHVYAGDNIGLFPVSAGSIALRGGYAELGSSFHHARVYKITSGKKPAFAMLRVYTIDLLPYRNQDLFSVELKPQTMSMRQAEKKLRDALATGNAEYLGWLVVDDELVVDTSKIATDQVKAVEAELGTIRRWRVDGFFGDTRLRLRPLQMSKEGIKKESAPELSKIIDRPGWLPAVNKLFSEGNVTVVRRDSLGRVRLESTAHLPVTWKVQ

SEQ ID NO: 399 - protein, 1069 aa, Corynebacterium matruchotii
MAAIAIDDDGKPTEILSAISLIHDSGVDPDSAKSAATRLATSGIARRTRRLYRRKRKRLAKLDKFISSQGWPLKEFEKYEDPFYPWRVRAELATTAITDQQELGEKLSIALRHIARHRGWRNPYSKVTALYTVTEPSDAFLAMQEECAKQLGRTIPETITVGQLVTGMNLGKTRLRGENSLLAARPRQSDNANEIHTIAKVQGLSNELVRQIIDHVFAAESPKGSAAEQVGKDPLQPTKKRALKASDAFQQYRIAALIGNLRIRGGKGNRRLTTEETRLVFDYLRSLPAKQEPTWQLVAEQLKIDRGNLVGTAIMTDDGERAGAKPPVHDTNRIMENTKIKPLATWWKSADADARAAMVKALSNAEVDDFDSQAGAQVQEFFFGISDEDQEKLDGLHLPIGRAAYSEDTLDRLTKRMIGEGMDLYEARQAEFKISNDWAPPAPEIGERVGNPAVDRVLKATARWLNAAERQWGAPKSVNIEHVRAAFMSESSARELDRDNQQRAKRNVKVVAEMQEKLGIEGRPSRADVWRFQSIQRQNGKCAYCGAEISFKNSEMDHIIPQVGEGSTNTRDNLVAVCRECNSSKSNIAFAVWAENTSRPGVSVQKAIERTHHWVTDSGLRKPEFDKFRKQVCDRLRRKATDEPIDARSLESVAWMANELRSRIAQKFKDGDTKVRVYKGALTAEARRASGISGKLEFVDGKGKSRLDRRHHAVDAAVVAFTSNYVAETLALRSNMKFDQELRRKAPQWREFTGSDHVHQVEWTKWKYRMQALAELLNNALVQDRIVVMHNLRLRLGNGAAHEDTIGKLTRLKVGDAISTTDIDRASSEALWCALTRDPDYDPKTGLPENPNRTIRIHGTHLTASDEITVFPVAAASIPIRDGFAKLGSNYHHVRLFRVPSGKKYKYCLMQVYTVDLLKFRKEDLFTVELKPQTISVRTCEALLRKALANGTAEYLGWLVSDDELLIDTSSFDTPGIVKLREEYGPVNRWRLAGLTSVTRLNLRPLYLSKEGLKPNVNPEIKKIIDNRSWIITVNKLFSSGHVKIIRRDALGRPRLHSAAHLPICWEVK

SEQ ID NO: 400 - protein, 210 aa, Diplosphaera colitermitum
MSDILDKPIVLSLNRAWQVIGHRTVKQALVALNGGNADLPPALGLDIAYPKFDDGAWNFDRPLFLNPLPWSEWIELPVRDFDFAITTPRLRIRVPTVIVATQFAKMPVRIPRLTREAIFERDGGVCQYTGEHVGKHGGNLDHVVPRDRGGRDSFENLVWAKREINSLKANRLPHEAGLRLLRRPKAPAPLPASMTIREARHPDWRHFLTP

SEQ ID NO: 401 - protein, 1332 aa, Dolosigranulum pigrum
MQKNYTIGLDIGTNSVGWAVMKDDYTLIRKRMKVLGNTDIKKIKKNFWGVRLFDEGETAKETRLKRGTRRRYQRRRNRLIYLQDIFQQPMLAIDENFFHRLDDSFFVPDDKSYDRHPIFGSLEEEVAYHNTYPTIYHLRKHLADNPEKADLRLVYTALAHIVKYRGHFLIEGELNTENTSISETFEQFLDTYSDIFKEQLVGDISKVEEILSSKQSRSRKHEQIMALFPNENKLGNFGRFMMLIVGNTSNFKPVFDLDDEYKLKLSDETYEEDLDTLLGMTDDVFLDVFMAAKNVYDAVEMSAIISTDTGNSKAVLSNQMINFYDEHKVDLAQLKQFFKTHLPDKYYECFSDPSKNGYAGYIDGKTNQEDFYKYIEKVMKTIKSDKKDYFLDKIDREVFLRKQRSFYNSVIPHQIHLQEMQAILDRQSQYYPFLAENRDKIESLVTFRIPYYVGPLTVSDQSEFAWMERQSDEPIRPWNFDEIVNKERSAEKFIERMTNMDTYLLEEKVLPKRSLLYQTFEVYNELTKVRYTNEQGKTEKLNRQQKAEIIETLFKQKNRVREKDIANYLEQYGYVDGTDIKGVEDKFNASLSTYNDLAKIDGAKAYLDDPEYADVWEDIIKILTIFEDKAMRKKQLQTYSDTLSPEILKKLERKHYTGWGRFSKKLINGLRDEGSNKTILDYLKSDEGSSGPTNRNFMQLIRDNTLSFKKKIEDAQTIEDTTHIYDTVAELPGSPAIKKGIRQALKIVEEIIDIIGYEPENIVVEMARESQTTKKGKDLSKERLEKLTEAIKEFDGPSDVKVKDLKNENLRNDRLYLYYLQNGRDMYTNEPLDINNLSKYDIDHIIPQSFTTDNSIDNKVLVSRTKNQGNKSDDVPSINIVHKMKPFWRQLHKAGLISDRKFKNLTKAEHGGLTEADRAHFLNRQLVETRQITKHVANLLDSQYNTAEEQRINIVLLKSSMTSRFRKEFKLYKVREINDYHHGHDAYLNAVVATTIMKVYPNLKPQFVYGQYKKTSMFKEEKATARKHFYSNITKFFKKEKVVNEETGEILWDTERHLSTIKRVLSWKQMNIVKKVEKQKGQLWKETIYPKGDSSKLIPVKEGMDPQKYGGLSQVSEAFAVVITHEKGKKKQLKSDLISIPIVDQKAYEQHPTAYLEEAGYNNPTVLHELFKYQLFELEDGSRRMIASAKEFQKGNQMVLPLELVELLYHANRYDKVKFPDSIEYVHDNLAKFDDLLEYVIDFSNKYINADKNVQKIQKIYKEHGTEDVELTVESFVNLMTFTAMGAPATFKFYGESITRSRYTSITEFRGSTLIFQSITGLYETRYKLEDN

SEQ ID NO: 402 - protein, 921 aa, Enterococcus faecalis
MIPHQIHLAELQAIIHRQAAYYPFLKENQEKIEQLVTFRIPYYVGPLSKGDASTFAWLKRQSEEPIRPWNLQETVDLDQSATAFIERMTNFDTYLPSEKVLPKHSLLYEKFMVFNELTKISYTDDRGIKANFSGKEKEKIFDYLFKTRRKVKKKDIIQFYRNEYNTEIVTLSGLEEDQFNASFSTYQDLLKCGLTRAELDHPDNAEKLEDIIKILTIFEDRQRIRTQLSTFKGQFSAEVLKKLERKHYTGWGRLSKKLINGIYDKESGKTILGYLIKDDGVSKHYNRNFMQLINDSQLSFKNAIQKAQSSEHEETLSETVNELAGSPAIKKGIYQSLKIVDELVAIMGYAPKRIVVEMARENQTTSTGKRRSIQRLKIVEKAMAEIGSNLLKEQPTTNEQLRDTRLFLYYMQNGKDMYTGDELSLHRLSHYDIDHIIPQSFMKDDSLDNLVLVGSTENRGKSDDVPSKEVVKDMKAYWEKLYAAGLISQRKFQRLTKGEQGGLTLEDKAHFIQRQLVETRQITKNVAGILDQRYNANSKEKKVQIITLKASLTSQFRSIFGLYKVREVNDYHHGQDAYLNCVVATTLLKVYPNLAPEFVYGEYPKFQTFKENKATAKAIIYTNLLRFFTEDEPRFTKDGEILWSNSYLKTIKKELNYHQMNIVKKVEVQKGGFSKESIKPKGPSNKLIPVKNGLDPQKYGGFDSPIVAYTVLFTHEKGKKPLIKQEILGITIMEKTRFEQNRILFLEEKGFLRPRVLMKLPKYTLYEFPEGRRRLLASAKEAQKGNQMVLPEHLLTLLYHAKQCLLPNQSESLTYVEQHQPEFQEILERVVDFAEVHTLAKSKVQQIVKLFEANQTADVKEIAASFIQLMQFNAMGAPSTFKFFQKDIERARYTSIKEIFDATIIYQSTTGLYETRRKVVD

SEQ ID NO: 403 - protein, 1337 aa, Enterococcus faecalis; identical to SEQ ID NO: 115

SEQ ID NO: 404 - protein, 1337 aa, Enterococcus faecalis
MKKDYVIGLDIGTNSVGWAVMTEDYQLVKKKMPIYGNTEKKKIKKNFWGVRLFEEGHTAEDRRLKRTARRRISRRRNRLRYLQAFFEEAMTALDENFFARLQESFLVPEDKKWHRHPIFAKLEDEVAYHETYPTIYHLRKKLADSSEQADLRLIYLALAHIVKYRGHFLIEGKLSTENISVKEQFQQFMIIYNQTFVNGESRLVSAPLPESVLIEEELTEKASRTKKSEKVLQQFPQEKANGLFGQFLKLMVGNKADFKKVFGLEEEAKITYASESYEEDLEGILAKVGDEYSDVFLAAKNVYDAVELSTILADSDKKSHAKLSSSMIVRFTEHQEDLKNFKRFIRENCPDEYDNLFKNEQKDGYAGYITHAGKVSQLKFYQYVKKIIQDIAGAEYFLEKIAQENFLRKQRTFDNGVIPHQIHLAELQAIIHRQAAYYPFLKENQEKIEQLVTFRIPYYVGPLSKGDANTFAWLKRQSEEPIRPWNLQETVDLDQSATAFIERMTNFDTYLPSEKVLPKHSLLYEKFMVFNELTKISYTDDRGIKANFSGKEKEKIFDYLFKTRRKVKKKDIIQFYRNEYNTEIVTLSGLEEDQFNASFSTYQDLLKCGLTRAELDHPDNAEKLEDIIKILTIFEDRQRIRTQLSTFKGQFSAEVLKKLERKHYTGWGRLSKKLINGIYDKESGKTILDYLIKDDGVSKHYNRNFMQLINDSQLSFKNAIQKAQSSEHEETLSETVNELAGSPAIKKGIYQSLKIVDELVAIMGYAPKRIVVEMARENQTTSTGKRRSIQRLKIVEKAMAEIGSNLLKEQPTTNEQLRDTRLFLYYMQNGKDMYTGDELSLHRLSHYDIDHIIPQSFMKDDSLDNLVLVGSTENRGKSDDVPSKEVVKDMKAYWEKLYAAGLISQRKFQRLTKGEQGGLTLEDKAHFIQRQLVETRQITKNVAGILDQRYNAKSKEKKVQIITLKASLTSQFRSIFGLYKVREVNDYHHGQDAYLNCVVATTLLKVYPNLAPEFVYGEYPKFQTFKENKATAKAIIYTNLLRFFTEDEPRFTKDGEILWSNSYLKTIKKELNYHQMNIVKKVEVQKGGFSKESIKPKGPSNKLIPVKNGLDPQKYGGFDSPIVAYTVLFTHEKGKKPLIKQEILGITIMEKTRFEQNPILFLEEKGFLRPRVLMKLPKYTLYQFPEGRRRLLASAKEAQKGNQMVLPEHLLTLLYHAKQCLLPNQSESLAYVEQHQPEFQEILERVVDFAEVHTLAKSKVQQIVKLFEANQTADVKEIAASFIQLMQFNAMGAPSTFKFFQKDIERARYTSIKEIFDATIIYQSTTGLYETRRKVVD

SEQ ID NO: 405 - protein, 1337 aa, Enterococcus faecalis
MKKDYVIGLDIGTNSVGWAVMTEDYQLVKKKMPIYGNTEKKKIKKNFWGVRLFEEGHTAEDRRLKRTARRRISRRRNRLRYLQAFFEEAMTALDENFFARLQESFLVPEDKKWHRHPIFAKLEDEVAYHETYPTIYHLRKKLADSSEQADLRLIYLALAHIVKYRGHFLIEGKLSTENISVKEQFQQFMIIYNQTFVNGESRLVSTPLPESVLIEEELTEKASRTKKSEKVLQQFPQEKANGLFGQFLKLMVGNKADFKKVFGLEEEAKITYASESYEEDLEGILAKVGDEYSDVFLAAKNVYDAVELSTILADSDKKSHAKLSSSMIVRFTEHQEDLKNFKRFIRENCPDEYDNLFKNEQKDGYAGYITHAGKVSQLKFYQYVKKIIQDIAGAEYFLEKIAQENFLRKQRTFDNGVIPHQIHLAELQAIIHRQAAYYPFLKENQEKIEQLVTFRIPYYVGPLSKGDASTFAWLKRQSEEPIRPWNLQETVDLDQSATAFIERMTNFDTYLPSEKVLPKHSLLYEKFMVFNELTKISYTDDRGIKANFSGKEKEKIFDYLFKTRRKVKKKDIIQFYRNEYNTEIVTLSGLEEDQFNASFSTYQDLLKCGLTRAELDHPDNAEKLEDIIKILTIFEDRQRIRTQLSTFKGQFSAEVLKKLERKHYTGWGRLSKKLINGIYDKESGKTILDYLVKDDGVSKHYNRNFMQLINDSQLSFKNAIQKAQSSEHEETLSETVNELAGSPAIKKGIYQSLKIVDELVAIMGYAPKRIVVEMARENQTTSTGKRRSIQRLKIVEKAMAEIGSNLLKEQPTTNEQLRDTRLFLYYMQNGKDMYTGDELSLHRLSHYDIDHIIPQSFMKDDSLDNLVLVGSTENRGKSDDVPSKEVVKDMKAYWEKLYAAGLISQRKFQRLTKGEQGGLTLEDKAHFIQRQLVETRQITKNVAGILDQRYNAKSKEKKVQIITLKASLTSQFRSIFGLYKVREVNDYHHGQDAYLNCVVATTLLKVYPNLAPEFVYGEYPKFQTFKENKATAKAIIYTNLLRFFTEDEPRFTKDGEILWSNSYLKTIKKELNYHQMNIVKKVEVQKGGFSKESIKPKGPSNKLIPVKNGLDPQKYGGFDSPIVAYTVLFTHEKGKKPLIKQEILGITIMEKTRFEQNPILFLEEKGFLRPRVLMKLPKYTLYEFPEGRRRLLASAKEAQKGNQMVLPEHLLTLLYHAKQCLLPNQSESLAYVEQHQPEFQEILERVVDFAEVHTLAKSKVQQIVKLFEANQTADVKEIAASFIQLMQFNAMGAPSTFKFFQKDIERARYTSIKEIFDATIIYQSTTGLYETRRKVVD

SEQ ID NO: 406 - protein, 1337 aa, Enterococcus faecalis
MKKDYVIGLDIGTNSVGWAVMTEDYQLVKKKMPIYGNTEKKKIKKNFWGVRLFEEGHTAEDRRLKRTARRRISRRRNRLRYLQAFFEEAMTDLDENFFARLQESFLVPEDKKWHRHPIFAKLEDEVAYHETYPTIYHLRKKLADSSEQADLRLIYLALAHIVKYRGHFLIEGKLSTENISVKEQFQQFMIIYNQTFVNGESRLVSAPLPESVLIEEELTEKASRTKKSEKVLQQFPQEKANGLFGQFLKLMVGNKADFKKVFGLEEEAKITYASESYEEDLEGILAKVGDEYSDVFLAAKNVYDAVELSTILADSDKKSHAKLSSSMIVRFTEHQEDLKKFKRFIRENCPDEYDNLFKNEQKDGYAGYIAHAGKVSQLKFYQYVKKIIQDIAGAEYFLEKIAQENFLRKQRTFDNGVIPHQIHLAELQAIIHRQAAYYPFLKENQEKIEQLVTFRIPYYVGPLSKGDASTFAWLKRQSEEPIRPWNLQETVDLDQSATAFIERMTNFDTYLPSEKVLPKHSLLYEKFMVFNELTKISYTDDRGIKANFSGKEKEKIFDYLFKTRRKVKKKDIIQFYRNEYNTEIVTLSGLEEDQFNASFSTYQDLLKCGLTRAELDHPDNAEKLEDIIKILTIFEDRQRIRTQLSTFKGQFSAEVLKKLERKHYTGWGRLSKKLINGIYDKESGKTILGYLIKDDGVSKHYNRNFMQLINDSQLSFKNAIQKAQSSEHEETLSETVNELAGSPAIKKGIYQSLKIVDELVAIMGYAPKRIVVEMARENQTTSTGKRRSIQRLKIVEKAMAEIGSNLLKEQPTTNEQLRDTRLFLYYMQNGKDMYTGDELSLHRLSHYDIDHIIPQSFMKDDSLDNLVLVGSTENRGKSDDVPSKEVVKDMKAYWEKLYAAGLISQRKFQRLTKGEQGGLTLEDKAHFIQRQLVETRQITKNVAGILDQRYNANSKEKKVQIITLKASLTSQFRSIFGLYKVREVNDYHHGQDAYLNCVVATTLLKVYPNLAPEFVYGEYPKFQTFKENKATAKAIIYTNLLRFFTEDEPRFTKDGEILWSNSYLKTIKKELNYHQMNIVKKVEVQKGGFSKESIKPKGPSNKLIPVKNGLDPQKYGGFDSPIVAYTVLFTHEKGKKPLIKQEILGITIMEKTRFEQNPILFLEEKGFLRPRVLMKLPKYTLYEFPEGRRRLLASAKEAQKGNQMVLPEHLLTLLYHAKQCLLPNQSESLAYVEQHQPEFQEILERVVDFAEVHTLAKSKVQQIVKLFEANQTADVKEIAASFIQLMQFNAMGAPSTFKFFQKDIERARYTSIKEIFDATIIYQSTTGLYETRRKVVD

SEQ ID NO: 407 - protein, 936 aa, Enterococcus faecalis
MKKDYVIGLDIGTNSVGWAVMTEDYQLVKKKMPIYGNTEKKKIKKNFWGVRLFEEGHTAEDRRLKRTARRRISRRRNRLRYLQAFFEEAMTDLDENFFARLQESFLVPEDKKWHRHPIFAKLEDEVAYHETYPTIYHLRKKLADSSEQADLRLIYLALAHIVKYRGHFLIEGKLSTENISVKEQFQQFMIIYNQTFVNGESRLVSAPLPESVLIEEELTEKASRTKKSEKVLQQFPQEKANGLFGQFLKLMVGNKADFKKVFGLEEEAKITYASESYEEDLEGILAKVGDEYSDVFLAAKNVYDAVELSTILADSDKKSHAKLSSSMIVRFTEHQEDLKKFKRFIRENCPDEYDNLFKNEQKDGYAGYIAHAGKVSQLKFYQYVKKIIQDIAGAEYFLEKIAQENFLRKQRTFDNGVIPHQIHLAELQAIIHRQAAYYPFLKENQEKIEQLVTFRIPYYVGPLSKGDASTFAWLKRQSEEPIRPWNLQETVDLDQSATAFIERMTNFDTYLPSEKVLPKHSLLYEKFMVFNELTKISYTDDRGIKANFSGKEKEKIFDYLFKTRRKVKKKDIIQFYRNEYNTEIVTLSGLEEDQFNASFSTYQDLLKCGLTRAELDHPDNAEKLEDIIKILTIFEDRQRIRTQLSTFKGQFSAEVLKKLERKHYTGWGRLSKKLINGIYDKESGKTILGYLIKDDGVSKHYNRNFMQLINDSQLSFKNAIQKAQSSEHEETLSETVNELAGSPAIKKGIYQSLKIVDELVAIMGYAPKRIVVEMARENQTTSTGKRRSIQRLKIVEKAMAEIGSNLLKEQPTTNEQLRDTRLFLYYMQNGKDMYTGDELSLHRLSHYDIDHIIPQSFMKDDSLDNLVLVGSTENRGKSDDVPSKEVVKDMKAYWEKLYAAGLISQRKFQRLTKGEQGGLTLEDKAHFIQRQLVETR

SEQ ID NO: 408 - protein, 1337 aa, Enterococcus faecalis
MKKDYVIGLDIGTNSVGWAVMTEDYQLVKKKMPIYGNTEKKKIKKNFWGVRLFEEGHTAEDRRLKRTARRRISRRRNRLRYLQAFFEEAMTDLDENFFARLQESFLVPEDKKWHRHPIFAKLEDEVAYHETYPTIYHLRKKLADSSEQADLRLIYLALAHIVKYRGHFLIEGKLSTENISVKEQFQQFMIIYNQTFVNGESRLVSAPLPESVLIEEELTEKASRTKKSEKVLQQFPQEKANGLFGQFLKLMVGNKADFKKVFGLEEEAKITYASESYEEDLEGILAKVGDEYSDVFLAAKNVYDAVELSTILADSDKKSHAKLSSSMIVRFTEHQEDLKKFKRFIRENCPDEYDNLFKNEQKDGYAGYIAHAGKVSQLKFYQYVKKIIQDIAGAEYFLEKIAQENFLRKQRTFDNGVIPHQIHLAELQAIIHRQAAYYPFLKENQEKIEQLVTFRIPYYVGPLSKGDASTFAWLKRQSEEPIRPWNLQETVDLDQSATAFIERMTNFDTYLPSEKVLPKHSLLYEKFMVFNELTKISYTDDRGIKANFSGKEKEKIFDYLFKTRRKVKKKDIIQFYRNEYNTEIVTLSGLEEDQFNASFSTYQDLLKCGLTRAELDHPDNAEKLEDIIKILTIFEDRQRIRTQLSTFKGQFSAEVLKKLERKHYTGWGRLSKKLINGIYDKESGKTILDYLVKDDGVSKHYNRNFMQLINDSQLSFKNAIQKAQSSEHEETLSETVNELAGSPAIKKGIYQSLKIVDELVAIMGYAPKRIVVEMARENQTTSTGKRRSIQRLKIVEKAMAEIGSNLLKEQPTTNEQLRDTRLFLYYMQNGKDMYTGDELSLHRLSHYDIDHIIPQSFMKDDSLDNLVLVGSTENRGKSDDVPSKEVVKDMKAYWEKLYAAGLISQRKFQRLTKGEQGGLTLEDKAHFIQRQLVETRQITKNVAGILNQRYNANSKEKKVQIITLKASLTSQFRSIFGLYKVREVNDYHHGQDAYLNCVVATTLLKVYPNLAPEFVYGEYPKFQTFKENKATAKAIIYTNLLRFFTEDEPRFTKDGEILWSNSYLKTIKKELNYHQMNIVKKVEVQKGGFSKESIKPKGPSNKLIPVKNGLDPQKYGGFDSPVVAYTVLFTHEKGKKPLIKQEILGITIMEKTRFEQNPILFLEEKGFLRPRVLMKLPKYTLYEFPEGRRRLLASAKEAQKGNQMVLPEHLLTLLYHAKQCLLPNQSESLAYVEQHQPEFQEILERVVDFAEVHTLAKSKVQQIVKLFEANQTADVKEIAASFIQLMQFNAMGAPSTFKFFQKDIERARYTSIKEIFDATIIYQSTTGLYETRRKVVD

SEQ ID NO: 409 - protein, 1337 aa, Enterococcus faecalis
MKKDYVIGLDIGTNSVGWAVMTEDYQLVKKKMPIYGNTEKKKIKKNFWGVRLFEEGHTAEDRRLKRTARRRISRRRNRLRYLQAFFEEAMTDLDENFFARLQESFLVPEDKKWHRHPIFAKLEDEVAYHETYPTIYHLRKKLADSSEQADLRLIYLALAHIVKYRGHFLIEGKLSTENISVKEQFQQFMIIYNQTFVNGESRLVSAPLPESVLIEEELTEKASRTKKSEKVLQQFPQEKANGLFGQFLKLMVGNKADFKKVFGLEEEAKITYASESYEEDLEGILAKVGDEYSDVFLAAKNVYDAVELSTILADSDKKSHAKLSSSMIVRFTEHQEDLKKFKRFIRENCPDEYDNLFKNEQKDGYAGYIAHAGKVSQLKFYQYVKKIIQDIAGAEYFLEKIAQENFLRKQRTFDNGVIPHQIHLAELQAIIHRQAAYYPFLKENQEKIEQLVTFRIPYYVGPLSKGDASTFAWLKRQSEEPIRPWNLQETVDLDQSATAFIERMTNFDTYLPSEKVLPKHSLLYEKFMVFNELTKISYTDDRGIKANFSGKEKEKIFDYLFKTRRKVKKKDIIQFYRNEYNTEIVTLSGLEEDQFNASFSTYQDLLKCGLTRAELDHPDNAEKLEDIIKILTIFEDRQRIRTQLSTFKGQFSAEVLKKLERKHYTGWGRLSKKLINGIYDKESGKTILGYLIKDDGVSKHYNRNFMQLINDSQLSFKNAIQKAQSSEHEETLSETVNELAGSPAIKKGIYQSLKIVDELVAIMGYAPKRIVVEMARENQTTSTGKRRSIQRLKIVEKAMAEIGSNLLKEQPTTNEQLRDTRLFLYYMQNGKDMYTGDELSLHRLSHYDIDHIIPQSFMKDDSLDNLVLVGSTENLGKSDDVPSKEVVKDMKAYWEKLYAAGLISQRKFQRLTKGEQGGLTLEDKAHFIQRQLVETRQITKNVAGILDQRYNANSKEKKVQIITLKASLTSQFRSIFGLYKVREVNDYHHGQDAYLNCVVATTLLKVYPNLAPEFVYGEYPKFQTFKENKATAKAIIYTNLLRFFTEDEPRFTKDGEILWSNSYLKTIKKELNYHQMNIVKKVEVQKGGFSKESIKPKGPSNKLIPVKNGLDPQKYGGFDSPIVAYTVLFTHEKGKKPLIKQEILGITIMEKTRFEQNPILFLEEKGFLRPRVLMKLPKYTLYEFPEGRRRLLASAKEAQKGNQMVLPEHLLTLLYHAKQCLLPNQSESLAYVEQHQPEFQEILERVVDFAEVHTLAKSKVQQIVKLFEANQTADVKEIAASFIQLMQFNAMGAPSTFKFFQKDIERARYTSIKEIFDATIIYQSTTGLYETRRKVVD

SEQ ID NO: 410 - protein, 1337 aa, Enterococcus faecalis
MKKDYVIGLDIGTNSVGWAVMTEDYQLVKKKMPIYGNTEKKKIKKNFWGVRLFEEGHTAEDRRLKRTARRRISRRRNRLRYLQAFFEEAMTDLDENFFARLQESFLVPEDKKWHRHPIFAKLEDEVAYHETYPTIYHLRKKLADSSEQADLRLIYLALAHIVKYRGHFLIEGKLSTENTSVKEQFQQFMVIYNQTFVNGESRLVSAPLPESVLIEEELTEKASRTKKSEKVLQQFPQEKANGLFGQFLKLMVGNKADFKKVFGLEEEAKITYASESYEEDLEGILAKVGDEYSDVFLAAKNVYDAVELSTILADSDKKSHAKLSSSMIVRFTEHQEDLKKFKRFIRENCPDEYDNLFKNEQKDGYAGYIAHAGKVSQLKFYQYVKKIIQDIAGAEYFLEKIAQENFLRKQRTFDNGVIPHQIHLAELQAIIHRQAAYYPFLKENQEKIEQLVTFRIPYYVGPLSKGDASTFAWLKRQSEEPIRPWNLQETVDLDQSATAFIERMTNFDTYLPSEKVLPKHSLLYEKFMVFNELTKISYTDDRGIKANFSGKEKEKIFDYLFKTRRKVKKKDIIQFYRNEYNTEIVTLSGLEEDQFNASFSTYQDLLKCGLTRAELDHPDNAEKLEDIIKILTIFEDRQRIRTQLSTFKGQFSAEVLKKLERKHYTGWGRLSKKLINGIYDKESGKTILDYLVKDDGVSKHYNRNFMQLINDSQLSFKNAIQKAQSSEHEETLSETVNELAGSPAIKKGIYQSLKIVDELVAIMGYAPKRIVVEMARENQTTSTGKRRSIQRLKIVEKAMAEIGSNLLKEQPTTNEQLRDTRLFLYYMQNGKDMYTGDELSLHRLSHYDIDHIIPQSFMKDDSLDNLVLVGSTENRGKSDDVPSKKVVKKMKAYWEKLYAAGLISQRKFQRLTKGEQGGLTLEDKAHFIQRQLVETRQITKNVAGILDQRYNAKSKEKKVQIITLKASLTSQFRSIFGLYKVREVNDYHHGQDAYLNCVVATTLLKVYPNLAPEFVYGEYPKFQAFKENKATAKTIIYTNLMRFFTEDEPRFTKDSEILWSNSYLKTIKKELNYHQMNIVKKVEVQKGGFSKESIKPKGPSNKLIPVKNGLDPQKYGGFDSPVVAYTVLFTHEKGKKPLIKQEILGITIMEKTRFEQNPILFLEEKGFLRPRVLMKLPKYTLYEFPEGRRRLLASAKEAQKGNQMVLPEHLLTLLYHAKQCLLPNQSESLAYVEQHQPEFQEILERVVDFAEVHTLAKSKVQQIVKLFEANQTADVKEIAASFIQLMQFNAMGAPSTFKFFQKDIERARYTSIKEIFDATIIYQSTTGLYETRRKVVD

SEQ ID NO: 411 - protein, 1150 aa, Enterococcus faecalis
MYSIGLDLGISSVGWSVIDERTGNVIDLGVRLFSAKNSEKNLERRTNRGGRRLIRRKTNRLKDAKKILAAVGFYEDKSLKNSCPYQLRVKGLTEPLSKGEIYKVTLHILKKRGISYLDEDDTEAAKESQDYKEQVRENAQLLTKYTPGQIQLQRLKENNRVKTGINAQGNYQLNVFKVSAYANELATILKTQQAFYPNELTDDWIALFVQPGIAEEAGLIYRKRPYYHGPGNEANNSPYGRWSDFKKTGQPATNIFDKLIGKDFQGELRASGLSLSAQQYNLLNDLTNLKIDGEIPLSPEQKEYILAELMTKEFTRFGVNDVVKLLGVKKERLSGWRLDKKGKPEIHTLKGYRNWRKIFAESGIDLAMLPTETIDCLAKILTLNTEREGIENTLAFELPELAESVKLLVLDRYKELSQSVSTQAWHRFSLKTLHLLIPELMNATSEQNTLLEQFQLKSDVRKRYSEYKKLPTKDVLTEIYNPTVNKTVSQAFKVIDALLVKYGKEQIRYITIEMPRDDNEEDEKKRIKELHAKNSQRKNDSQSYFMQKSGWSQEKFQTTIQKNRRFLAKLLYYYEQDGICAYTGLSISPELLVSDSTEIDHIIPISISLDDSINNKVLVLSKANQVKGQQTPYDAWMDGSFKKINGKFSNWDDYQKWVESRHFSHKKENNLLETRNIFDSEQVEKFLARNLNDTRYASRLVLNTLQSFFANQETKVRVVNGSFTHTLRKKWGADLDKTRETHHHHAVDATLCAVTPFVKVSRYHYAVKEETGEKVMREIDFETGEIVDEMSYREFKKSKKYERKTYQVKWPNFREQLKPVNLHPRIKFSHQVDRKANRKLSDATIYSVREKTEVKTLKSGKQKITTDEYTIGKIKDIYTVDGWEAFKKKQDKLLMKDLDEKTYERLLSIAETTPDFQEVEEKNGKVKRVKRSPFAVYCEENDIPAIRKYAKKNNGPLIRSLKYYDGKLNKHINITKDSQGRPVEKTKNGRKVTLQSLKPYRYDIYQDLETKAYYTVQLYYSDLRFVEGKYGITEKEYMKKVAEQTKGQVVRFCFSLQKNDGLEIEWKDSQRYDVRFYNFQSANSINFKGLEQEMMPAENQFKQKPYNNGAINLNIAKYGKEGKKLRKFNTDILGKKHYLYYEKEPKNIIK

SEQ ID NO: 412 - protein, 1150 aa, Enterococcus faecalis
MYSIGLDLGISSVGWSVIDERTGNVIDLGVRLFSAKNSEKNLERRTNRGGRRLIRRKTNRLKDAKKILAAVGFYEDKSLKNSCPYQLRVKGLTEPLSKGEIYKVTLHILKKRGISYLDEDDTEAAKESQDYKEQVRKNAQLLTKYTPGQIQLQRLKENNRVKTGINAQGNYQLNVFKVSAYANELATILKTQQAFYPNELTDDWIALFVQPGIAEEAGLIYRKRPYYHGPGNEANNSPYGRWSDFKKTGQPATNIFDRLIGKDFQGELRASGLSLSAQQYNLLNDLTNLKIDGEIPLSPEQKEYILAELMTKEFTRFGVNDVAKLLGVKKERLSGWRLDKKGKPEIHTLKGYRNWRKIFAESGIDLATLPTETIDCLAKVLTLNTEHEGIENTLAFELPELAESVKLLVLDRYKELSQSVSTQAWHRFSLKTLHLLIPELMNATSEQNTLLEQFQLKSDVRKRYSEYKKLPTKDVLTEIYNPTVNKTVSQAFKVIDALLVKYGKEQIRYITIEMPRDDNEEDEKKRIKELHAKNSQRKNDSQSYFMQKSGWSQEKFQTTIQKNRRFLAKLLYYYEQDGICAYTGLSISPELLVSDSTEIDHIIPISISLDDSINNKVLVLSKANQVKGQQTPYDAWMDGSFKKINGKFSNWDDYQKWVESRHFSHKKENNLLETRNIFDSEQVEKFLARNLNDTRYASRLVLNTLQSFFANHETKVRVVNGSFTHTLRKKWGADLDKTRETHHHHAVDATLCAVTPFVKVSRYHYAVKEETGEKVMREIDFETGEIVDEMSYQEFKKSKKYERKTYQVKWPNFREQLKPVNLHPRIKFSHQVDRKANRKLSDATIYSVREKTEVKTLKSGKQKITTDEYTIGKIKDIYTVDGWEAFKKKQDKLLMKDLDEKTYERLLSIAETTPDFQEVEEKNGKVKRVKRSPFAVYCEENDIPAIQKYAKKNNGPLIRSLKYYDGKLNKHINITKDSQGRPVEKTKNGRKVTLQSLKPYRYDIYQDLETKAYYTVQLYYSDLRFVEGKYGITEKEYMKKVAEQTKGQVVRFCFSLQKNDGLEIEWKDSQRYDVRFYNFQSANSINFKGLEQEMMPAENQFKQKPYNNGAINLNIAKYGKEGKKLRKFNTDILGKKHYLYYEKEPKNIIK

SEQ ID NO: 413 - protein, 1150 aa, Enterococcus faecalis
MYSIGLDLGISSVGWSVIDERTGNVIDLGVRLFSAKNSEKNLERRTNRGGRRLIRRKTNRLKDAKKILAAVGFYEDKSLKNSCPYQLRVKGLTEPLSKGEIYKVTLHILKKRGISYLDEDDTEAAKESQDYKEQVRKNAQLLTKYTPGQIQLQRLKENNRVKTGINVQGNYQLNVFKVSAYANELATILKTQQAFYPNELTDDWIALFVQPGIAEEAGLIYRKRPYYHGPGNEANNSPYGRWSDFQKTGEPATNIFDKLIGKDFQGELRASGLSLSAQQYNLLNDLTNLKIDGEVPLSSEQKEYILTELMTKEFTRFGVNDVVKLLGVKKERLSGWRLDKKGKPEIHTLKGYRNWRKIFAEAGIDLATLPTETIDCLAKVLTLNTEREGIENTLAFELPELSESVKLLVLDRYKELSQSISTQSWHRFSLKTLHLLIPELMNATSEQNTLLEQFQLKSDVRKRYSEYKKLPTKDVLAEIYNPTVNKTVSQAFKVIDALLVKYGKEQIRYITIEMPRDDNEEDEKKRIKELHAKNSQRKNDSQSYFMQKSGWSQEKFQTTIQKNRRFLAKLLYYYEQDGICAYTGLPISPELLVSDSTEIDHIIPISISLDDSINNKVLVLSKANQVKGQQTPYDAWMDGSFKKINGKFSNWDDYQKWVESRHFSHKKENNLLETRNIFDSEQVEKFLARNLNDTRYASRLVLNTLQSFFTNQETKVRVVNGSFTHTLRKKWGADLDKTRETHHHHAVDATLCAVTPFVKVSRYHYAVKEETGEKVMREIDFETGEIVNEMSYREFKKSKKYERKTYQVKWPNFREQLKPVNLHPRIKFSHQVDRKANRKLSDATIYSVREKTEVKTLKSGKQKITTDEYTIGKIKDIYTLDGWEAFKKKQDKLLMKDLDEKTYERLLSIAETTPDFQEVEEKNGKVKRVKRSPFAVYCEENDIPAIQKYAKKNNGPLIRSLKYYDGKLNKHINITKDSQGRPVEKTKNGRKVTLQSLKPYRYDIYQDLETKAYYTVQLYYSDLRFVEGKYGITEKEYMKKVAEQTKGQVVRFCFSLQKNDGLEIEWKDSQRYDVRFYNFQSANSINFKGLEQEIMPAENQFKQKPYNNGAINLNIAKYGKEGKKLRKFNTDILGKKHYLFYEKEPKNIIK

SEQ ID NO: 414 - protein, 1150 aa, Enterococcus faecalis; identical to SEQ ID NO: 183

SEQ ID NO: 415 - protein, 1150 aa, Enterococcus faecalis; identical to SEQ ID NO: 184

SEQ ID NO: 416 - protein, 1340 aa, Enterococcus faecium
MKKEYTIGLDIGTNSVGWSVLTDDYRLVSKKMKVAGNTEKSSTKKNFWGVRLFDEGQTAEARRSKRTARRRLARRRQRILELQKIFAPEILKIDEHFFARLNESFLVLDEKKQSRHPVFATIKQEKSYHQTYPTIYHLRQALADSSEKADIRLVYLAMAHLLKYRGHFLIEGELNTENSSVTETFRQFLSTYNQQFSEADDKQTEKLDEAVDCSFVFTEKMSKTKKAETLLKYFPHEKSNGYLSQFIKLMVGNQGNFKNVFGLEEEAKLQFSKETYEEDLEELLEKIGDDYIDLFVQAKNVYDAVLLSEILSDSTKNTRAKLSAGMIRRYDAHKEDLVLLKRFVKENLPKKYRAFFGDNSVNGYAGYIEGHATQEDFYKFVKKELTGIRGSEVFLTKIEQENFLRKQRTFDNGVIPHQIHLTELRAIIANQKKHYPFLKEEQEKLESLLTFKIPYYVGPLAKKQENSPFAWLIRKSEEKIKPWNLPEIVDMEGSAVRFIERMNNTDMYIPHNKVLPKNSLLYQKFSIYNELTKVRYQDERGQMNYFSSIEKKEIFHELFEKNRKVTKKDLQEFLYLKYDIKHAELSGIEKAFNASYTTYHDFLTMSENKREMKQWLEDPELASMFEEIIKTLTVFEDREMIKTRLSHHEATLGKHIIKKLTKKHYTGWGRLSKELIQGIRDKQSNKTILDYLINDDDFPHHRNRNFMQLINDDSLSFKKEIKKAQMITDTENLEEIVKELTGSPAIKKGILQSLKIVDEIVGIMGYEPANIVVEMARENQTTGRGLKSSRPRLKALEESLKDFGSQLLKEYPTDNSSLQKDRLYLYYLQNGRDMYTGAPLDIHRLSDYDIDHIIPRSFTTDNSIDNKVLVSSKENRLKKDDVPSEKVVKKMRSFWYDLYSSKLISKRKLDNLTKIKLTEEDKAGFIKRQLVETRQITKHVAGILHHRFNKAEDTNEPIRKVRIITLKSALVSQFRNRFGIYKVREINEYHHAHDAYLNGVVALALLKKYPQLAPEFVYGEYLKFNAHKANKATVKKEFYSNIMKFFESDTPVCDENGEIFWDKSKSIAQVKKVINHHHMNIVKKTEIQKGGFSKETVEPKKDSSKLLPRKNNWDPAKYGGLGSPNVAYTVAFTYEKGKARKRTNALEGITIMEREAFEQSPVLFLKNKGYEQAEIEMKLPKYALFELENGRKRMVASNKEAQKANSFLLPEHLVTLLYHAKQYDEISHKESFDYVNEHHKEFSEVFARVLEFAGKYTLAEKNIEKLEKIYKENQTDDLAKLASSFVNLMQFNAMGAPADFKFFDVTIPRKRYTSLTEIWQSTIIHQSITGLYETRIRMGK

SEQ ID NO: 417 - protein, 1339 aa, Enterococcus faecium
MKKEYTIGLDIGTNSVGWSVLTDDYRLVSKKMKVAGNTEKSSTKKNFWGVRLFDEGQTAEARRSKRTARRRLARRRQRILELQKIFAPEILKIDEHFFARLNESFLVLDEKKQSRHPVFATIKQEKSYHQTYPTIYHLRQALADSSEKADIRLVYLAMAHLLKYRGHFLIEGELNTENSSVTETFRQFLSTYNQQFSEADDKQTEKLDEAVDCSFVFTEKMSKTKKAETLLKYFPHEKSNGYLSQFIKLMVGNQGNFKNVFGLEEAKLQFSKETYEEDLEELLEKIGDDYIDLFVQAKNVYDAVLLSEILSDSTKNTRAKLSAGMIRRYDAHKEDLVLLKRFVKENLPKKYRAFFGDNSVNGYAGYIEGHATQEDFYKFVKKELTGIRGSEVFLTKIEQENFLRKQRTFDNGVIPHQIHLTELRAIIANQKKHYPFLKEEQEKLESLLTFKIPYYVGPLAKKQENSPFAWLIRKSEEKIKPWNLPEIVDMEGSAVRFIERMINTDMYMPHNKVLPKNSLLYQKFSIYNELTKVRYQDERGQMNYFSSIEKKEIFHELFEKNRKVTKKDLQEFLYLKYDIKHAELSGIEKAFNASYTTYHDFLTMSENKREMKQWLEDPELASMFEEIIKTLTVFEDREMIKTRLSHHEATLGKHIIKKLTKKHYTGWGRLSKELIQGIRDKQSNKTILDYLINDDDFPHHRNRNFMQLINDDSLSFKKEIKKAQMITDTENLEEIVKELTGSPAIKKGILQSLKIVDEIVGIMGYEPANIVVEMARENQTTGRGLKSSRPRLKALEESLKDFGSQLLKEYPTDNSSLQKDRLYLYYLQNGRDMYTGAPLDIHRLSDYDIDHIIPRSFTTDNSIDNKVLVSSKENRLKKDDVPSEKVVKKMRSFWYDLYSSKLISKRKLDNLTKIKLTEEDKAGFIKRQLVETRQITKHVAGILHHRFNKAEDTNEPIRKVRIITLKSALVSQFRNRFGIYKVREINEYHHAHDAYLNGVVALALLKKYPQLAPEFVYGEYLKFNAHKANKATVKKEFYSNIMKFFESDTPVCDENGEIFWDKSKSIAQVKKVINHHHMNIVKKTEIQKGGFSKETVEPKKDSSKLLPRKNNWDPAKYGGLGSPNVAYTVAFTYEKGKARKRTNALEGITIMEREAFEQSPVLFLKNKGYEQAEIEMKLPKYALFELENGRKRMVASNKEAQKANSFLLPEHLVTLLYHAKQYDEISHKESFDYVNEHHKEFSEVFARVLEFAGKYTLAEKNIEKLEKIYKENQTDDLAKLASSFVNLMQFNAMGAPADFKFFDVTIPRKRYTSLTEIWQSTIIHQSITGLYETRIRMGK

SEQ ID NO: 418 - protein, 1340 aa, Enterococcus faecium
MKKEYTIGLDIGTNSVGWSVLTDDYRLVSKKMKVAGNTEKSSTKKNFWGVRLFDEGQTAEARRSKRTARRRLARRRQRILELQKIFAPEILKIDEHFFARLNESFLVLDEKKQSRHPVFATIKQEKSYHQTYPTIYHLRQALADSSEKADIRLVYLAMAHLLKYRGHFLIEGELNTENSSVTETFRQFLSTYNQQFSEADDKQTEKLDEAVDCSFVFTEKMSKTKKAETLLKYFPHEKSNGYLSQFIKLMVGNQGNFKNVFGLEEEAKLQFSKETYEEDLEELLEKIGDDYIDLFVQAKNVYDAVLLSEILSDSTKNTRAKLSAGMIRRYDAHKEDLVLLKRFVKENLPKKYRAFFGDNSVNGYAGYIEGHATQEDFYKFVKKELTGIRGSEVFLTKIEQENFLRKQRTFDNGVIPHQIHLTELRAIIANQKKHYPFLKEEQEKLESLLTFKIPYYVGPLAKKQENSPFAWLIRKSEEKIKPWNLPEIVDMEGSAVRFIERMINTDMYIPHNKVLPKNSLLYQKFSIYNELTKVRYQDERGQMNYFSSIEKKEIFHELFEKNRKVTKKDLQEFLYLKYDIKHAELSGIEKAFNASYTTYHDFLTMSENKREMKQWLEDPELASMFEEIIKTLTVFEDREMIKTRLSHHEATLGKHIIKKLTKKHYTGWGRLSKELIQGIRDKQSNKTILDYLINDDDFPHHRNRNFMQLINDDSLSFKKEIKKAQMITDTENLEEIVKELTGSPAIKKGILQSLKIVDEIVGIMGYEPANIVVEMARENQTTGRGLKSSRPRLKALEESLKDFGSQLLKEYPTDNSSLQKDRLYLYYLQNGRDMYTGAPLDIHRLSDYDIDHIIPRSFTTDNSIDNKVLVSSKENRLKKDDVPSEKVVKKMRSFWYDLYSSKLISKRKLDNLTKIKLTEEDKAGFIKRQLVETRQITKHVAGILHHRFNKAEDTNEPIRKVRIITLKSALVSQFRNRFGIYKVREINEYHHAHDAYLNGVVALALLKKYPQLAPEFVYGEYLKFNAHKANKATVKKEFYSNIMKFFESDTPVCDENGEIFWDKSKSIAQVKKVINHHHMNIVKKTEIQKGGFSKETVEPKKDSSKLLPRKNNWDPAKYGGLGSPNVAYTVAFTYEKGKARKRTNALEGITIMEREAFEQSPVLFLKNKGYEQAEIEMKLPKYALFELENGRKRMVASNKEAQKANSFLLPEHLVTLLYHAKQYDEISHKESFDYVNEHHKEFSEVFARVLEFAGKYTLAEKNIEKLEKIYKENQTDDLAKLASSFVNLMQFNAMGAPADFKFFDVTIPRKRYTSLTEIWQSTIIHQSITGLYETRIRMGK

SEQ ID NO: 419 - protein, 1340 aa, Enterococcus faecium
MKKEYTIGLDIGTNSVGWSVLTDDYRLVSKKMKVAGNTEKSSTKKNFWGVRLFDEGQTAEARRSKRTARRRLARRRQRILELQKIFAPEILKIDEHFFARLNESFLVLDEKKQSRHPVFATIKQEKSYHQTYPTIYHLRQALADSSEKADIRLVYLAMAHLLKYRGHFLIEGELNTENSSVTETFRQFLSTYNQQFSEADDKQTEKLDEAVDCSFVFTEKMSKTKKAETLLKYFPHEKSNGYLSQFIKLMVGNQGNFKNVFGLEEEAKLQFSKETYEEDLEELLEKIGDDYIDLFVQAKNVYDAVLLSEILSDSTKNTRAKLSAGMIRRYDAHKEDLVLLKRFVKENLPKKYRAFFGDNSVNGYAGYIEGHATQEDFYKFVKKELTGIRGSEVFLTKIEQENFLRKQRTFDNGVIPHQIHLTELRAIIANQKKHYPFLKEEQEKLESLLTFKIPYYVGPLAKKQENSPFAWLIRKSEEKIKPWNLPEIVDMEGSAVRFIERMINTDMYMPHNKVLPKNSLLYQKFSIYNELTKVRYQDERGQMNYFSSIEKKEIFHELFEKNRKVTKKDLQEFLYLKYDIKHAELSGIEKAFNASYTTYHDFLTMSENKREMKQWLEDPELASMFEEIIKTLTVFEDREMIKTRLSHHEATLGKHIIKKLTKKHYTGWGRLSKELIQGIRDKQSNKTILDYLINDDDFPHHRNRNFMQLINDDSLSFKKEIKKAQMITDTENLEEIVKELTGSPAIKKGILQSLKIVDEIVGIMGYEPANIVVEMARENQTTGRGLKSSRPRLKALEESLKDFGSQLLKEYPTDNSSLQKDRLYLYYLQNGRDMYTGAPLDIHRLSDYDIDHIIPRSFTTDNSIDNKVLVSSKENRLKKDDVPSEKVVKKMRSFWYDLYSSKLISKRKLDNLTKIKLTEEDKAGFIKRQLVETRQITKHVAGILHHRFNKAEDTNEPIRKVRIITLKSALVSQFRNRFGIYKVREINEYHHAHDAYLNGVVALALLKKYPQLAPEFVYGEYLKFNAHKANKATVKKEFYSNIMKFFESDTPVCDENGEIFWDKSKSIAQVKKVINHHHMNIVKKTEIQKGGFSKETVEPKKDSSKLLPRKNNWDPAKYGGLGSPNVAYTVAFTYEKGKARKRTNALEGITIMEREAFEQSPVLFLKNKGYEQAEIEMKLPKYALFELENGRKRMVASNKEAQKANSFLLPEHLVTLLYHAKQYDEISHKESFDYVNEHHKEFSEVFARVLEFAGKYTLAEKNIEKLEKIYKENQTDDLAKLASSFVNLMQFNAMGAPADFKFFDVTIPRKRYTSLTEIWQSTIIHQSITGLYETRIRMGK

SEQ ID NO: 420 - protein, 1339 aa, Enterococcus faecium
MKKEYTIGLDIGTNSVGWSVLTDDYRLVSKKMKVAGNTEKSSTKKNFWGVRLFDEGQTAEARRSKRTARRRLARRRQRILELQKIFAPEILKIDEHFFARLNESFLVLDEKKQSRHPVFATIKQEKSYHQTYPTIYHLRQALADSSEKADIRLVYLAMAHLLKYRGHFLIEGELNTENSSVTETFRQFLSTYNQQFSEADDKQTEKLDEAVDCSFVFTEKMSKTKKAETLLKYFPHEKSNGYLSQFIKLMVGNQGNFKNVFGLEEAKLQFSKETYEEDLEELLEKIGDDYIDLFVQAKNVYDAVLLSEILSDSTKNTRAKLSAGMIRRYDAHKEDLVLLKRFVKENLPKKYRAFFGDNSVNGYAGYIEGHATQEDFYKFVKKELTGIRGSEVFLTKIEQENFLRKQRTFDNGVIPHQIHLTELRAIIANQKKHYPFLKEEQEKLESLLTFKIPYYVGPLAKKQENSPFAWLIRKSEEKIKPWNLPEIVDMEGSAVRFIERMINTDMYIPHNKVLPKNSLLYQKFSIYNELTKVRYQDERGQMNYFSSIEKKEIFHELFEKNRKVTKKDLQEFLYLKYDIKHAELSGIEKAFNASYTTYHDFLTMSENKREMKQWLEDPELASMFEEIIKTLTVFEDREMIKTRLSHHEATLGKHIIKKLTKKHYTGWGRLSKELIQGIRDKQSNKTILDYLINDDDFPHHRNRNFMQLINDDSLSFKKEIKKAQMITDTENLEEIVKELTGSPAIKKGILQSLKIVDEIVGIMGYEPANIVVEMARENQTTGRGLKSSRPRLKALEESLKDFGSQLLKEYPTDNSSLQKDRLYLYYLQNGRDMYTGAPLDIHRLSDYDIDHIIPRSFTTDNSIDNKVLVSSKENRLKKDDVPSEKVVKKMRSFWYDLYSSKLISKRKLDNLTKIKLTEEDKAGFIKRQLVETRQITKHVAGILHHRFNKAEDTNEPIRKVRIITLKSALVSQFRNRFGIYKVREINEYHHAHDAYLNGVVALALLKKYPQLAPEFVYGEYLKFNAHKANKATVKKEFYSNIMKFFESDTPVCDENGEIFWDKSKSIAQVKKVINHHHMNIVKKTEIQKGGFSEETVEPKKDSSKLLPRKNNWDPAKYGGLGSPNVAYTVAFTYEKGKARKRTNALEGITIMEREAFEQSPVLFLKNKGYEQAEIEMKLPKYALFELENGRKRMVASNKEAQKANSFLLPEHLVTLLYHAKQYDEISHKESFDYVNEHHKEFSEVFARVLEFAGKYTLAEKNIEKLEKIYKENQTDDLAKLASSFVNLMQFNAMGAPADFKFFDVTIPRKRYTSLTEIWQSTIIHQSITGLYETRIRMGK

SEQ ID NO: 421 - protein, 1340 aa, Enterococcus faecium
MKKEYTIGLDIGTNSVGWSVLTDDYRLVSKKMKVAGNTEKSSTKKNFWGVRLFDEGQTAEARRSKRTARRRLARRRQRILELQKIFAPEILKIDEHFFARLNESFLVLDEKKQSRHPVFATIKQEKSYHQTYPTIYHLRQALADSSEKADIRLVYLAMAHLLKYRGHFLIEGELNTENSSVTETFRQFLSTYNQQFSEADDKQTEKLDEAVDCSFVFTEKMSKTKKAETLLKYFPHEKSNGYLSQFIKLMVGNQGNFKNVFGLEEEAKLQFSKETYEEDLEELLEKIGDDYIDLFVQAKNVYDAVLLSEILSDSTKNTRAKLSAGMIRRYDAHKEDLVLLKRFVKENLPKKYRAFFGDNSVNGYAGYIEGHATQEDFYKFVKKELTGIRGSEVFLTKIEQENFLRKQRTFDNGVIPHQIHLTELRAIIANQKKHYPFLKEEQEKLESLLTFKIPYYVGPLAKKQENSPFAWLIRKSEEKIKPWNLPEIVDMEGSAVRFIERMINTDMYIPHNKVLPKNSLLYQKFSIYNELTKVRYQDERGQMNYFSSIEKKEIFHELFEKNRKVTKKDLQEFLYLKYDIKHAELSGIEKAFNASYTTYHDFLTMSENKREMKQWLEDPELASMFEEIIKTLTVFEDREMIKTRLSHHEATLGKHIIKKLTKKHYTGWGRLSKELIQGIRDKQSNKTILDYLINDDDFPHHRNRNCMQLINDDSLSFKKEIKKAQMITDTENLEEIVKELTGSPAIKKGILQSLKIVDEIVGIMGYEPANIVVEMARENQTTGRGLKSSRPRLKALEESLKDFGSQLLKEYPTDNSSLQKDRLYLYYLQNGRDMYTGAPLDIHRLSDYDIDHIIPRSFTTDNSIDNKVLVSSKENRLKKDDVPSEKVVKKMRSFWYDLYSSKLISKRKLDNLTKIKLTEEDKAGFIKRQLVETRQITKHVAGILHHRFNKAEDTNEPIRKVRIITLKSALVSQFRNRFGIYKVREINEYHHAHDAYLNGVVALALLKKYPQLAPEFVYGEYLKFNAHKANKATVKKEFYSNIMKFFESDTPVCDENGEIFWDKSKSIAQVKKVINHHHMNIVKKTEIQKGGFSKETVEPKKDSSKLLPRKNNWDPTKYGGLGSPNVAYTVAFTYEKGKARKRTNALEGITIMEREAFEQSPVLFLKNKGYEQAEIEMKLPKYALFELENGRKRMVASNKEAQKANSFLLPEHLVTLLYHAKQYDEISHKESFDYVNEHHKEFSEVFARVLEFAGKYTLAEKNIEKLEKIYKENQTDDLAKLASSFVNLMQFNAMGAPADFKFFDVTIPRKRYTSLTEIWQSTIIHQSITGLYETRIRMGK

SEQ ID NO: 422 - protein, 892 aa, Enterococcus faecium
MTFKIPYYVGPLAKKQENSPFAWLIRKSEEKIKPWNLPEIVDMEGSAVRFIERMINTDMYMPHNKVLPKNSLLYQKFSIYNELTKVRYQDERGQMNYFSSIEKKEIFHELFEKNRKVTKKDLQEFLYLKYDIKHAELSGIEKAFNASYTTYHDFLTMSENKREMEQWLEDPELASMFEEIIKTLTVFEDREMIKTRLSHHKATLGKHIIKKLTKKHYTGWGRLSKELIQGIRDKQSNKTILDYLINDDDFPHHRNRNFMQLINDDSLSFKKEIKKAQMITDTENLEEIVKELTGSPAIKKGILQSLKIVDEIVGIMGYEPANIVVEMARENQTTGRGLKSSRPRLKALEESLKDFGSQLLKEYPTDNSSLQKDRLYLYYLQNGRDMYTGAPLDIHRLSDYDIDHIIPRSFTTDNSIDNKVLVSSKENRLKKDDVPSEKVVKKMRSFWYDLYSSKLISKRKLDNLTKIKLTEEDKAGFIKRQLVETRQITKHVAGILHHRFNKAEDTNEPIRKVRIITLKSALVSQFRNRFGIYKVREINEYHHAHDAYLNGVIALALLKKYPQLAPEFVYGEYLKFNAHKANKATVKKEFYSNIMKFFESDTPVCDENGEIFWDKSKSIAQVKKVINHHHMNIVKKTEIQKGGFSKETVEPKKDSSKLLPRKNNWDPAKYGGLGSPNVAYTVAFTYEKGKARKRTNALEGITIMEREAFEQSPVLFLKNKGYEQAEIEMKLPKYALFELENGRKRMVASNKEAQKANSFLLPEHLVTLLYHAKQYDEISHKESFDYVNEHHKEFSEVFARVLEFAGKYTLAEKNIEKLEKIYKENQTDDLAKLASSFVNLMQFNAMGAPADFKFFDVTIPRKRYTSLTEIWQSTIIHQSITGLYETRIRMGK

SEQ ID NO: 423 - protein, 1336 aa, Enterococcus hirae
MTKDYTIGLDIGTNSVGWAVLTDDYQLMKRKMSVHGNTEKKKIKKNFWGARLFDEGQTAEFRRTKRTNRRRLARRKYRLSKLQDLFAEELCKQDDCFFVRLEESFLVPEEKQYKPASIFPTLEEEKEYYQKYPTIYHLRQKLVDSTEKEDLRLVYLALAHLLKYRGHFLFEGDLDTENTSIEESFRVFLEQYSKQSDQPLIVHQPVLTILTDKLSKTKKVEEILKYYPTEKINSFFAQCLKLIVGNQANFKRIFDLEAEVKLQFSKETYEEDLESLLEKIGDEYLDIFLQAKKVHDAILLSEIISSTVKHTKAKLSSGMVERYERHKADLAKFKQFVKENVPQKATVFFKDTTKNGYAGYIKGKTTQEEFYKFVKKELSGVVGSEPFLEKIDQETFLLKQRTYTNGVIPHQVHLIELKAIIDQQKQHYPFLEEAGPKIIALFKFRIPYYVGPLAKEQEASSFAWIERKTAEKINPWNFSEVVDIEKSAMRFIQRMTKQDTYLPTEKVLPKNSLLYQKYMIFNELTKVSYKDERGVKQYFSGDEKQQIFKQLFQKERGKITVKKLQNFLYTHYHIENAQIFGIEKAFNASYSTYHDFMKLAKTNQKAMQEWLEQPEMEPIFEDIVKILTIFEDRQMIKHQLSKYQEVFGEKLLKEFARKHYTGWGRFSAKLIHGIRDRKTNKTILDYLINDDDVPANRNRNLMQLINDEHLSFKEEIAKATVFSKHKSLVDVIQDLPGSPAIKKGIWQSLKIVEELIAIIGYKPKNIVIEMARENQKTHRTSPRLKALENGLKQIGSTLLKEQPTDNKALQKERLYLYYLQNGRDMYTGEPLEIENLHQYEVDHIIPRSFIVDNSIDNKVLVASKQNQKKRDDVPKKQIVNEQRIFWNQLKEAKLISPKKYAYLTKIELTPEDKARFIQRQLVETRQITKHVANILHQSFNQEEEGTDCDGVQIITLKATLTSQFRQTFGLYKVREINPHHHAHDAYLNGFIANVLLKRYPKLAPEFVYGKYVKYSLARENKATAKKEFYSNILKFLESDEPFCDENGEIYWEKSHHLPRIKKVLSSHQVNVVKKVEQQKGGFYKETVNSKEKPDKLIERKNNWDVTKYGGFGSPVIAYAIAFVYAKGKTQKKTRAIEGITIMEQAAFEKDPTTFLKEKGFPQVTEFIKLPKYTLFEFDNGRRRFLASHKESQKGNPFILSDQLVTLLYHAQHYDKITYQESFDYVNTHLSDFSAILTEVLAFAEKYTLADKNIERIQELYEENKYGETSMIAQSFLQLLQFNAIGAPADFKFFGVTIPRKRYTSLTEIWDATIIYQSVTGLYETRIRMGDLWAGEQ

SEQ ID NO: 424 - protein, 116 aa, Enterococcus sp.
MYSIGLDLGISSVGWSVIDERTGNVIDLGVRLFSAKNSEKNLERRTNRGGRRLIRRKTNRLKDAKKILAAVGFYEDKSLKNSCPYQLRVKGLTELLSKGEIYKVTLHILKNVELVT

SEQ ID NO: 425 - protein, 1391 aa, Eubacterium sp.
MENKQYYIGLDVGTNSVGWAVTDTSYNLLRAKGKDMWGARLFDEAKTAVERRTKRTSRRRSEREKARKAMLKELFADEINKVDPNFFIRLEESKFFLDDRSENNRQRYTLFNDAKFTDKDYYEKYKTIFHLRSALINSDEKFDVRLVFLAILNLFSHRGHFLNASLKGDGEIQGVDIFYNDLYEVCEEFEIDLPQISNIDNFEKILSQKGKSRTKILEELSEELSISKKEKIKYSLLKLICGMKIKVVDIYADEDIQEDDKKKDLGFRESDYEKSSLEVKEIIGDDHFELIERAKAVHDIGLLANIIGNSKYLCEARVEAYDNHHKDLQKIKELLKKYDIKAYTDMFRKMTDKNYSAYVGSVNSNIAKERRSVDNRKIEDLYEYIKKIALKNISDDNEDKIEILKKIETGEFLKKQLTASNGVIPNQLQSRELRAILKKAENYLPFLKEKGEKNLTVSEMIIQLFEFQIPYYVGPLDKNPKKDKNANSWAVIPSGGRILPWNFEDKVDVKGSRKEFIEKMVRKCTYLSEEHTLPKQSLLYEKFMVLNEINNIKIDGEKISVEAKQKIYNDLFMKGKKVSQKAIKQELISLNIMSKDSVLSGIDTVCNAYLSSIAKFRGVFDENVNNQSTIDMIEDIIFLKTVYSDEKRFVKEEIVEKYGDEIDKDKIKRILGFKFSNWGNISKSFLELEGADVGTGEIRSIIQSLWETNFNLMELLSSRFTYMDELEKRVKKLEKPLSEWTIEDLDDMYLSSPVKRMIWQSMKIVDEIQTVIGYAPKRIFVEMTRSEGEKVRTKSRKDRLKELYSAIKEDSKQWVKELDAKDESYFRSKKMYLYYLQKGRCMYSGEVIELDKLMDDNLYDIDHIYPRSFVKDDSLDNLVLVKKEINNRKQNDPITPQIQASCQGFWKVLHEQGFISNEKYSRLTRKTQEFSDEEKLSFINRQIVETGQATKCMAQILQKSMGEDVDVVFSKARLVSEFRHKFELFKSRLINDFHHANDAYLNIVVGNSYFVKFTRNPANFIKDARKNPDNPAYKYHMDRFFERDVKSKSEVAWIGQSEGNAGTIAIVKKTMSKNSPLITKKVEEGHGSITKETIVGVKEIKFGRNKVEKADKTPKKANLQAYRPIKTSDERLCNILRYGGRTSISISGYCLVEYVKKRKTIRSLEAIPVYLGRKDSLSEEKLLNYFRYNLNDGGKDSVSDIRLCLPFISTNSLVKIDGYLYYLGGKNDDRIQLYNAYQLKMKKEEVEYIRKIEKAVSMSKFDEIDREKNPVLTEEKNIELYNKIQDKFENTVFSKRMSLVKYNKKDLSFGDFLKNKKSKFEEIDLEKQCKVLYNIIFNLSNLKEVDLSDIGGSKSTGKCRCKKNITNYKEFKLIQQSITGLYSCEKDLMTI

SEQ ID NO: 426 - protein, 1391 aa, Eubacterium yurii
MENKQYYIGLDVGTNSVGWAVTDTSYNLLRAKGKDMWGARLFEKANTAAERRTKRTSRRRSEREKARKAMLKELFADEINRVDPSFFIRLEESKFFLDDRSENNRQRYTLFNDATFTDKDYYEKYKTIFHLRSALINSDEKFDVRLVFLAILNLFSHRGHFLNASLKGDGDIQGMDVFYNDLVESCEYFEIELPRITNIDNFEKILSQKGKSRTKILEELSEELSISKKDKSKYNLIKLISGLEASVVELYNIEDIQDENKKIKIGFRESDYEESSLKVKEIIGDEYFDLVERAKSVHDMGLLSNIIGNSKYLCEARVEAYENHHKDLLKIKELLKKYDKKAYNDMFRKMTDKNYSAYVGSVNSNIAKERRSVDKRKIEDLYKYIEDTALKNIPDDNKDKIEILEKIKLGEFLKKQLTASNGVIPNQLQSRELRAILKKAENYLPFLKEKGEKNLTVSEMIIQLFEFQIPYYVGPLDKNPKKDNKANSWAKIKQGGRILPWNFEDKVDVKGSRKEFIEKMVRKCTYISDEHTLPKQSLLYEKFMVLNEINNIKIDGEKISVEAKQKIYNDLFVKGKKVSQKDIKKELISLNIMDKDSVLSGTDTVCNAYLSSIGKFTGVFKEEINKQSIVDMIEDIIFLKTVYGDEKRFVKEEIVEKYGDEIDKDKIKRILGFKFSNWGNLSKSFLELEGADVGTGEVRSIIQSLWETNFNLMELLSSRFTYMDELEKRVKKLEKPLSEWTIEDLDDMYLSSPVKRMIWQSMKIVDEIQTVIGYAPKRIFVEMTRSEGEKVRTKSRKDRLKELYNGIKEDSKQWVKELDSKDESYFRSKKMYLYYLQKGRCMYSGEVIELDKLMDDNLYDIDHIYPRSFVKDDSLDNLVLVKKEINNRKQNDPITPQIQASCQGFWKILHDQGFMSNEKYSRLTRKTQEFSDEEKLSFINRQIVETGQATKCMAQILQKSMGEDVDVVFSKARLVSEFRHKFELFKSRLINDFHHANDAYLNIVVGNSYFVKFTRNPANFIKDARKNPDNPVYKYHMDRFFERDVKSKSEVAWIGQSEGNSGTIVIVKKTMAKNSPLITKKVEEGHGSITKETIVGVKEIKFGRNKVEKADKTPKKPNLQAYRPIKTSDERLCNILRYGGRTSISISGYCLVEYVKKRKTIRSLEAIPVYLGRKDSLSEEKLLNYFRYNLNDGGKDSVSDIRLCLPFISTNSLVKIDGYLYYLGGKNDDRIQLYNAYQLKMKKEEVEYIRKIEKAVSMSKFDEIDREKNPVLTEEKNIELYNKIQDKFENTVFSKRMSLVKYNKKDLSFGDFLKNKKSKFEEIDLEKQCKVLYNIIFNLSNLKEVDLSDIGGSKSTGKCRCKKNITNYKEFKLIQQSITGLYSCEKDLMTI

SEQ ID NO: 427 - protein, 1142 aa, Facklamia hominis
MYSVGLDIGIASCGYSIINDVNGNIVELGTLLFKSRNSDNNEERRTNRGSRRLINRRRTRLDDGKKLLAEKGFKQDSKLKHVCPYELRVKGLHEKLTQGEIYKVVLHILKKRGISYLDESDENSSGIDGASYKDQVNLNLNLQKELTPGQIQLKRLKENGRIKSGVTFENGYQLNVFSVSAYANELNKILTKQSEYYSEIDQIWIDRFTKNGYRKEAGLVYRKRPYYDGPGNEKNNSIYGRWANFKEDGHPKENIFDQLIGLDSVDSTQVRASASTLTAQKYNLLNDLNNLTIIEDDRKFTTDEKVSIINYLMTQDITRFGPKELAKFYQLEVDQIRGWRIDNKGNPEIHSLKVYRDWKKIFNTSSIDLTSIQTWVVDELANVITLNTEIPSTLATLKIKIPDIDQQILNFVENNFYELKKKTSKNSWHSFSLKTLNILIPELLNTSEEQNTILERLNLKFDLKNKYAEKNQIPVKELLEQIYNPTVTKSVHQSIKLFNEIIEKYGKNNISYVTIEMPRDKNDQDQKDTIKRINKLNSERKNDSEKYFLERSGWDTIRFESALKKPRFAEKLLFYYEQKGKCAYSGQDILAESLLNESCEVDHIIPLSISFDDSIHNKVLVTASSNQEKGQRTPYMAFIDGAKLGQSWDDFVAWVNSCGFHRKKVQNLLYEENIFNPDVQRGFVSRNLNDTRYASRIVLNAIQSFFYKQKDLTKVKVVNGSFTHTLRKKWGSSLDKNRDTYHHHAVDATLCAVTPFINIVKYEFFEEDGIKYMVDLTTGEKVAYSDYKKMKFYDKRAYVPIWDGFIKQLTPANLYPKIKFSHQVDSKWNRKISDATIYSTRKIVETKINKKGVAKETVKDIVIDKIKDIYTPEGWRKFKEKQDKLLMKNFDEKTYNKLIKIAKEYPEKKEVQTSNGKVSLVEVSPFKMYCEEQNVPAIRKYSKKGNGPYIRSLKFYDKELGKHINITKDSYGNDIERTIRNKKIILKNQNSWRTDVYYNSVNNCYELLGIKYCHLKFYRGKYGIPKSIYDELKKEDEISSESVFKFSLYRHDRVRFEKDGEYIEALFGSKNESNKNYLELSPIDKNKWLSKENVKFFGEVAASGRFIKGLKPGIKVIKQSTDYMGHVYAIHQEKLKFVLSDA

SEQ ID NO: 428 - protein, 1347 aa, Finegoldia magna
MKSEKKYYIGLDVGTNSVGWAVTDEFYNILRAKGKDLWGVRLFEKAKTAADTRTFRSGRRRNDRKGMRLQILREIFEDEIKKVDKDFYDRLDESKFWAEDKKVSGKYSLFNDKNFSDKQYFEKFPTIFHLRKYLMEEHGKVDIRYYFLAINQMMKRRGHFLIDGQISHVTDDKPLKEQLILLINDLLKIELEEELMDSIFEILADVNEKRTDKKNNLKELIKGQDFNKQEGNILNSIFESIVTGKAKIKNIISDEDILEKIKEDNKEDFVLTGDSYEENLQYFEEVLQENITLFNTLKSTYDFVILQSILKGKSTLSDAQVERYDEHKKDLEILKKVIKKYDEDGKLFKQVFKEDNGNGYVSYIGYYLNKNKKITAKKKISNIEFTKYVKGILEKQCDCEDEAVKYLLGKIEQENFLLKQISSINSVIPHQIHLFELDKILENLAKNYPSFNNKKEEFTKIEKIRKTFTFRIPYYVGPLNDYHKNNGGNAWIFRNKGEKIRPWNFEKIVDLHKSEEEFIKRMLNQCTYLPEETVLPKSSILYSEYMVLNELNNLRIKGKPLDTDVKLKLIEELFKKKTKVTLKSIRDYMIRNNFADKEDFDNSEKNLEIVSNMKSYIDFNNILGDKFELEMVEDLIEKITIHTGNKTLLKKYIEETYPDLSSSQIQKIINLKYKDWGRLSRKLLDGIKGRNKTDDVNTVINFMRNSSDNLMQIIEGKNYSFNEYIDNLRKKYIPQEISYEVVENLYVSPSVKKMIWQVIRVTEEITKVMGYDPDKIFIEMAKSEEEKKTTISRKNKLLDLYKAIKKDERDSQYEKLLTGLNKLDESELRSKKLYLYYTQMGRDMYTGEKIDLDKLFDSTHYDKDHIIPQSMKKDDSIINNLVLVNKNANQTTKGNIYPVPSSIRNNPDIYNYWKYLMEKEFISKEKYNRLIRNTPLTNEELGVFINRQLVETRQSTKAIKELFEKFYQKSKIIPVKASLASDLRKDMNTLKSREVNDLHHAHDAFLNIVAGDVWNREFTSNPINYVNENREGDKVKYSLSKYFTRPRKSKGKVIWTPEKGRKLIVDTLNKPSVLISNESHVKKGELFNATISGKKDYKKGKIYLPLKKDDRLKDVSKYGGYKAINGAFFFLVEHTKSKKRIRSIELFPLHLLSKFYEDKNTVLDYAINVLQLQDPKIIIDKINYRTEIIIDNFSYLISTKSNDGSITVKPNEQMYWRVDEISNLKKIENKYKKDAILTEEDRKIMESYIDKIYQQFKAGKYKNRRTTDTIIEKYEIIDLDTLDNKQLYQLLVAFISLSYKTSNNAVDFTVIGLGTECGKPRITNLPDNTYLVYKSITGIYEKRIRIK

SEQ ID NO: 429 - protein, 1348 aa, Finegoldia magna; identical to SEQ ID NO: 227

SEQ ID NO: 430 - protein, 1516 aa, Flavobacteriaceae bacterium
MLKQQKDKIIGMNKKILGLDLGTNSIGWALVKQDLENKYGEIIGCGSRIIPMSQDVLGKFDAGISISQTAERTNYRSVRKLIQRNTLRRERLHRVLHQLDFLPKHYNDSIDFEKKLGQFKTDKETKLNYFVNQHGKHEFLFKDSFNEMVKEFKEEQPELFYIKNNGKETKIPYDWTIYYLRKKALSKKISKEELSWLVLNFNQKRGYYQLRGEIDEEKEKNKRYEKLYVSEVVKTNNTIKKTGEYLYDIYFDNGWKYEKQTTKPQDWLHKHKEFIITTTTLKNGETKRTFKTVDSEKDWIAIKSKTEQDIKESNKTVGAFIYDTLLKNPTQKIRGSLVKTIERKFYREEFEKILKEQIKHRPEINVNTAIGKENYTKCVTELYPRNEAHANNILTNDFNYLFTKDILFYQRPLKSKKSEIANCQYEYRTYIKKKEKTGKEERVKQPLKATPKSHPLFQEFRLWQFIHNLKIYIRETTVGNKPLFDVDITDTFFTSENDWATLFEYLNNKKEIEQKHVLEYLVSKKIISKSEKTDYRWNYVEDKKYPGNETRVDFINRLKKVENLNVDEFLTSELEFKLWHIIYSVTDKNEYEKALENFAIRQNIDKDSFVNSFKKFPPFKSDYGAYSTKAIKKLLPLMRLGKFWDGSEIPKVVVEKITDIKTRLTSVNYDESLFKKDEKKILETIVDDITPKQLLKSFVKLKGKNHLAGLNTYQACYLVYERHSESSDITQWENPDDIDSFLNHFKQHSLRNPIVEQVVTETLRTVRDIWKYYGNGSPNYFNEIHIELGREMKNPADKRKQMSAKINENENTNQRIKGILQELMNDGVQDIKPYSPSQQEILKIYEEGISQNPNVDYSKVSEDEITKIKKSNNPTLKEIQRYKLWLEQKYISPYTGKPIPLSELFTPAYQIEHIIPQSRYFDNSLSNKIICESEVNEDKSNKTAYEYLKTNGGSIVHGHHLLSLKEYEDHCQHYFKKNRTKLKNLLSEEIPEGFINRQLNDSRYISKLIKGLLSNIVREENEQEATSKNIVPVTGSITSKLKQDWGLNDKWNEIIAPRFKRLNKMTNSNDFGYFDEKINTFRIQVPDAISRGFNKKRIDHRHHTLDALVIACCTKKHIQYLNSLNNEIIKHELKPSILIKNAQGDYTKHFMLPWNNFPIDCKNAIENTIVSFKQNLRVINKTSNKYQSYKDENGNLRLGKDGKPKKGLTKQTKGNNWAVRKAMHEDTFYGEIVDGENKGKLKIKTLLDTSFDVKKIEDKVLDKSIRTILINYLKQDKYKNLSKPHEEAFSPNGIIEMNKNIISLNNNIPHKPIKRVTLKHEKGKKFSIKTLLDKKTKFAKSATGTNVFFCIYKNINGKIKYHTPSFEEIIEIQKQEFEIKYKSKLNVPETLFDKKESFELLFYLQPNDLVYLPNDEELKNRQLIDFNNLNKKQIKRIYKFTDGSGTTANFIPYQVAKVIFNLNKKEQAKSSFKYPIQNEFGVGSPQSKNQKSIEGILIKERCIKLKIDRLGNISKA

SEQ ID NO: 431 - protein, 1629 aa, Francisella cf.
MNFKILPIAIDLGVKNTGVFSAFYQKGTSLERLDNKNGKVYELSKDSYTLLMNNRTARRHQRRGIDRKQLVKRLFKLIWTEQLNLEWDKDTQQAISFLFNRRGFSFITDGYSPEYLNIVPEQVKAILMDIFDDYNGEDDLDSYLKLATEQESKISEIYNKLMQKILEFKLRKLCTDIKDDKVSTKTLKEITSYEFELLADYLANYSEILKTQKFSYTDKQGNLKELSYYHHDKYNIQEFLKRHATINIQILDTLLTDDLDIWNFNFEKFDFDKNEEKLQNQEDKDHIQAHLHHFVFAVNKIKSEMASGGRHRSQYFQEITNVLDENNHQEGYLKNFCENLHNKKYSNLSVKNLVNLIGNLSNLELKPLRKYFNDKIHAKADHWDEQKFTETYCHWILGEWRVGVKDQDKKDGAKYSYKDLCNELKQKVTKAGLVDFLLELDPCRTIPPYLDNNNRKPPKCQSLILNPKFLDNQYPNWQQYLQELKKLQSIQNYLESFETDLKVLKSSKDQPYFVEYRSSNQQIASGQRDYKDLDARILQFIFDRVKASDELLLNEIYFQAKKLKQKASSELEKLESSKKLDEVIANSQLSQILKSQHTNGIFEQGTFLHLVCKYYKQRQRARDSRLYIMPEYRYDKKLHKYNNTGRFDDDNQLLTYCNHKPRQKRYQLLNDLAGVLQVSPNFLKDKIGSDDDLFISKWLVEHIRGFKKACEDSLKIQKDNRGLLNHKINIARNTKGKCEKEIFNLICKIEGSEDKKGNYKHGLAYELGVLLFGEPNEASKPEFDRKIKKFNSIYSFAQIQQIAFAERKGNANTCAVCSADNAHRMQQIKITEPVEDNKDKIILSAKAQRLPAITTRIVDGAVKKMATILAKNIVDDNWQNIKQVLSAKHQLHIPIITESNAFEFEPALADVKGKSLKDRRKKALERISPENIFKDKNNRIKEFAKGISAYSGANLTDGDFDGAKEELDHIIPRSHKKYGTLNDEANLICVTRGDNKNKGNRIFCLRDLANNYKLKQFETTDDLEIEKKIADTIWDANKKDFKFGNYRSFINLTPQEQKAFRHALFLADENPIKQAVIRAINNRNRTFVNGTQRYFAEVLANNIYLRAKKENLNTDKISFDYFGIPTIGNGRGIAEIRQLYEKVDSDIQAYAKGDKPQASYSHLIDAMLAFCIAADEHRNDGSIGLEIDKNYSLYPLDKNTGEVFTKDIFSQIKITDNEFSDKKLVRKKATEGFNTHRQMTRDGIYAENYLPILIHKELDEVRKGYTWKNSEEIKIFKGKKYDIQQLNNLLYCLKFVDKPISIDIQISTLEELRNILTTNNIAATAEYYYINLKTQKLHEYYIENYNTALGYKKYTKEMEFLRSLAYRSERVKIKSIDDVKQVLDKDSNFIIGKITLPFKKEWQRLYREWQNITIKDDYEFLKSFFNVKSITKLHKKVRKDFSLPISTNEGKFLVKRKTWDNNFIYQILNDSDSRVDGTKPFIPAFDISKNEIVEAIIDSFTSKNIFWLPKNIELQKVDNKNIFAIDTSKWFEVETPSDLRDIGVATIQYKIDNNSRPKVRVKLDYVIDDDSKINYFTNHSLLKSRYPDKVLEILKQSTIIEFESSGFNKTIKEMLGMTLAGIYNETSNN

SEQ ID NO: 432 - protein, 1646 aa, Francisella cf.
MNIKILPIAIDLGAKNTGVFSAFYQKGTSLESLDNKNGKVYELSKDSYTLLMNNRTARRHQRRGIDRKQLVKRLFKLIWTKQLNLEWNKDTQQTISFLLNRRGFSFITDGYSPEYLNIAPEAVKAILMSILDDYNGEDDLDSYLQSATENDSKIDELYNKLLQKALEFKLRKLCIDIKEDKVTTKTLKELSNTEFKLLANYLVDYDRILRTQKFSYTDKQGNLRELNYYHHDKYNIQEFLKRNIIINDVILEKLTDDLDIWNLNFDKFDFEKNLEKLENQEDKDYLQTHLHHFVFAVNKIKSEMASGGRHRSQYFQEITNVLVENNHQEGYLKNFCENLHNKKYSNLSVKNLVNLIGNLSNLELKPLRKYFNDKIHAKADYWDEQKFAETYSDWILGEWRVGAKDKDKKDGAKYSYKNLCDELKQKVGINQDGIINQTKSDFVDFLLELDPCRTIPPYLDNNNRKPPKCQSLILNPKFLDNKYPNWQQYLQELKKLQTVQNYLGNFEIDLKDLKSSKEQPYFVKYKSLNQQIASGQRDYKDLDARVLQFIFDRVKASDELLLNEIYSHAKKLKQNTSSELEKLELCKKLDEVIANSQLSQILKSQHVNGIFEQGTFLHLVCKYYKQRQRARDSRLYIMPEYRYDKKLDKYNNTGRFDDDNQLLTYCNHKPRQKRYQLLNDLAGVLQVSPNFLKDKIGSDDDLFISKWLVEHIRGFKKACEDSLKIQKDNRGLLNHKINIARNTKGKCEKEIFNLICKIEGSEDKKGNYKHGLAYELGVLLFGEPNQASKLEFDRKIKKFNSIYSFAQIQQIAFAERKGNANTCAVCSADNAHRMQQIKVAKPVEGNKDNIILSAKAQRLPAIPTRIVDGAVKKIATILARNIVDDNWDNIKQALSNNQQLHVPIITESNAFEFEPALADIKGKSLKDKRKKALERIDPENVFKDKNNRIKEFAKGISAYSDANLANGDFDGAKEELDHIIPRSHKKYGTLNDEANLICVTREDNQNRGNKAVFLYDLKPNYKLKQFNTTDDLEIEKKIADTIWDASKQDFKFGNYRSFINLTPQEQIAFRHALFLADKNPIKKAVIRAIDNRNRTFVNGTQRYFAEVLANNIYLRAKKENLATNRITFDYFGIETTNSNGRGIADVRKLYEKVDSDIQAYAKGDKPQDSYSHLIDAMIAFCVAADEHKNEGSIGLKMGNQYGLFPTPDKYDENTGEIISWHNDDIFRKIKVSDNQFSDKKLVRKKATEGFNTHRQMTRDGIYGESYLPILIHKNLNEVRKGYNWENSEEIKIFKGKKYDIQQLNNLVYCLKFVDKPISIDIQITTLEELRNILETNNISTTAEYYYINLKTQKLHEYYIENYNTALGYKKYTKEMEFLRSLAYRTERVKIKSIDDVSMILAKDSNFKAGKIELPFKTEWQRLYLEWQNTTIKDNHEFLKSYFSVKNATKQHKKVRKDFSLPISTNEGKLLVKRKTWDNNFIYQILNDSDSRADGTKPFIPAFDISKNEIVETIIKSFTSKNIFWLPKNIELQKVDNKSIFAIDTSRWFEVETPKDLIEIGVSTIQYKIDNNSRPKVRVKLDYVMDDDSKINYFMNHSLLKSRYPDKVLEILKQSTIIEFESSGFNKTIKEMLGMTLAGIYNETSNN

SEQ ID NO: 433 - protein, 1629 aa, Francisella novicida
MNFKILPIAIDLGVKNTGVFSAFYQKGTSLERLDNKNGKVYELSKDSYTLLMNNRTARRHQRRGIDRKQLVKKLFKLIWTEQLNLEWDKDTQQAISFLFNRRGFSFITDGYSPEYLNIVPEQVKAILMDIFDDYNGEDDLDSYLKLATEQESKISEIYNKLMQKILEFKLRKLCTDIKDDKVSTKTLKEITSYEFELLADYLANYSESLKTQKFSYTDKQGNLKELSYYHHDKYNIQEFLKRHATINDEILDTLLTDDLDIWNFNFEKFDFDKNEEKLQNQEDKDHTQAHLHHFVFAVNKIKSEMASGGRHRGQYFQEITNVLDENNHQEGYLKNFCENLHNKKYSNLSVKNLVNLIGNLSNLELKPLRKYFNDKIHAKADHWDEQKFTETYCHWILGEWRVGLKDQDKKEGAKYSYKDLCNELKQKVTNAGLIDFLLELDPCRTIPPYLDNNNRKPPKCQSLILNPKFLDNQYPNWQQYLQELKKLQIIQDYLESFETDLKVLKSSKDQPYFVEYKSSNQQIASGQRDYKDLDARILQFIFDRVKASDELLLNEIYFQAKKLKQKASSELEKLESSKKLDEVIANSQLSKILKSQHTNGIFEQGTFLHLVCKYYKQRQRARDSRLYIMPEYRYDKKLDKYNNTGRFDDDNQLLTYCNHKPRQKRYQLLNDLAGVLQVSPNFLKDKIGSDDDLFISKWLVEHIRGFKKACEDSLKIQKDNRGLLNHKINIARNTKGKCEKEIFNLICKIEGSEDKKGNYKHGLAYELGVLLFGEPNEASKPEFDRKIKKFNSIYSFAQIQQIAFAERKGNANTCAVCSADNAHRMQQIKITEPVEDNKDKIILSAKAQRLPAIPTRIVDGAVKKMATILAKNIVDDNWQNIKQVLSAKHQLHIPIITESNAFEFEPALADVKGKSLKDRRKKALERISPENIFKDKNNRIKEFAKGISAYSGANLTDGDFDGAKEELDHIIPRSHKKYGTLNDEANLICVTRDDNKNKGNRIFCLHDLANNYKLKQFETTDDLEIEKKIADTIWDASKKDFKFGNYRSFINLTPQEQKAFRHALFLADENPIKQAVIRAINNRNRTFVNGTQRYFAEVLANNIYLRAKKENLNTDKISFDYFGIPTIGNGRGIAEIRQLYEKVDSDIQVYAKGDKPQASYSHLIDAMLAFCIAADEHRNDGSIGLEIDKNYSLYPLDKNTGEVFTKDIFSQIKITDNEFSDKKLVRKKATEGFNTHRQMTRDGIYAENYLPILIHKELDEVRKGYTWKNSEEIKIFKGKKYDIQQLNNLLYCLKFVDKPISIDIQISTLEELRNILTTNNIAATAEYYYINLKTQKLHEYYIENYNTALGYKKYTKEMEFLRSLAYRSERVKIKSIDDVKQVLDKDSNFIIGKITLPFKKEWQRLYREWQNTTIKDDYEFLKSFFNVKSITKLHKKVRKDFSLPISTNEGKFLVKRKTWDNNFIYQILNDSDSRVDGTKPFIPAFDISKNEIVEAIIDSFTSKNIFWLPKNIELQKVDNKNIFAIDTSKWFEVETPSDLRDIGVATIQYKIDNNSRPKVRVKLDYVIDDDSKINYFTNHSLLKSRYPDKVLEILKQSTIIEFESSGFNKTIKEMLGMTLAGIYNETSNN

SEQ ID NO: 434 - protein, 1629 aa, Francisella novicida
MNFKILPIAIDLGVKNTGVFSAFYQKGTSLERLDNKNGKVYELSKDSYTLLMNNRTARRHQRRGIDRKQLVKRLFKLIWTEQLNLEWDKDTQQAISFLFNRRGFSFITDGYSPEYLNIVPEQVKAILMDIFDDYNGEDDLDSYLKLATEQESKISEIYNKLMQKILEFKLMKLCTDIKDDKVSTKTLKEITSYEFELLADYLANYSESLKTQKFSYTDKQGNLKELSYYHHDKYNIQEFLKRHATINDRILDTLLTDDLDIWNFNFEKFDFDKNEEKLQNQEDKDHIQAHLHHFVFAVNKIKSEMASGGRHRSQYFQEITNVLDENNHQEGYLKNFCENLHNKKYSNLSVKNLVNLIGNLSNLELKPLRKYFNDKIHAKADHWDEQKFTETYCHWILGEWRVGVKDQDKKDGAKYSYKDLCNELKQKVTKAGLVDFLLELDPCRTIPPYLDNNNRKPPKCQSLILNPKFLDNQYPNWQQYLQELKKLQSIQNYLDSFETDLKVLKSSKDQPYFVEYKSSNQQIASGQRDYKDLDARILQFIFDRVKASDELLLNEIYFQAKKLKQKASSELEKLESSKKLDEVIANSQLSQILKSQHTNGIFEQGTFLHLVCKYYKQRQRARDSRLYIMPEYRYDKKLHKYNNTGRFDDDNQLLTYCNHKPRQKRYQLLNDLAGVLQVSPNFLKDKIGSDDDLFISKWLVEHIRGFKKACEDSLKIQKDNRGLLNHKINIARNTKGKCEKEIFNLICKIEGSEDKKGNYKHGLAYELGVLLFGEPNEASKPEFDRKIKKFNSIYSFAQIQQIAFAERKGNANTCAVCSADNAHRMQQIKITEPVEDNKDKIILSAKAQRLPAIPTRIVDGAVKKMATILAKNIVDDNWQNIKQVLSAKHQLHIPIITESNAFEFEPALADVKGKSLKDRRKKALERISPENIFKDKNNRIKEFAKGISAYSGANLTDGDFDGAKEELDHIIPRSHKKYGTLNDEANLICVTRGDNKNKGNRIFCLRDLADNYKLKQFETTDDLEIEKKIADTIWDANKKDFKFGNYRSFINLTPQEQKAFRHALFLADENPIKQAVIRAINNRNRTFVNGTQRYFAEVLANNIYLRAKKENLNTDKISFDYFGIPTIGNGRGIAEIRQLYEKVDSDIQAYAKGDKPQASYSHLIDAMLAFCIAADEHRNDGSIGLEIDKNYSLYPLDKNTGEVFTKDIFSQIKITDNEFSDKKLVRKKAIEGFNTHRQMTRDGIYAENYLPILIHKELNEVRKGYTWKNSEEIKIFKGKKYDIQQLNNLVYCLKFVDKPISIDIQISTLEELRNILTTNNIAATAEYYYINLKTQKLHEYYIENYNTALGYKKYSKEMEFLRSLAYRSERVKIKSIDDVKQVLDKDSNFIIGKITLPFKKEWQRLYREWQNTTIKDDYEFLKSFFNVKSITKLHKKVRKDFSLPISTNEGKFLVKRKTWDNNFIYQILNDSDSRVDGTKPFIPAFDISKNEIVEAIIDSFTSKNIFWLPKNIELQKVDNKNIFAIDTSKWFEVETPSDLRDIGVATIQYKIDNNSRPKVRVKLDYVIDDDSKINYFTNHSLLKSRYPDKVLEILKQSTTIEFESSGFNKTIKEMLGMTLAGIYNETSNN

SEQ ID NO: 435 - protein, 244 aa, Francisella tularensis
ARKQNSEIYNKLMQKILEFKLRKLCTDIKDDKVSTKTLKEITSYEFELLADYLANYSESLKTQKFSYTDKQGNLKELSYYHHDKYNIQEFLKRHATINDEILDTLLTDDFDIWNFNFEKFDFDKNEEKLQNQEDKDHTQAYLHHFVFAVNKIKSEMASGGRHRSQYFQEITNVLDENNHQEGYLKNFCENLHNKKYSNLSVKNLVNLVGNLSNLELKPLRKYFNDKNLIIGMSKSLQKLIATGY

SEQ ID NO: 436 - protein, 501 aa, Francisella tularensis
MEIEKKIADTIWDASKQDFKFGNYRSFINLTPQEQKAFRYALFLADENSIKQAVIRAINNRNRTFVNGTQRYFAEVLANNIYLRAKKENLNTDKISFDYFGIPTIGNGRGIADIRQLYEKVDSDIQAYAKGDKPQASYSHLIDAMIAFCVAADEHRNDGSIGLEIDKNYSLYLLDKNTGEVFTKDIFSQIKITDNEFSDKKLVRKKATEGFNTHRQMTRDGIYAENYLPILIHKELDEVRKGYTWGNSEELKIHKGKKYNIQQLNNIVYCLKFIDKSISIDIQISTLEELRNILTTNNIAATAEYYYINLKNQKLHEYYIENYNTALDYKKYSKEMEFLRSLAYRSERVKIKSIDDVKQVLDKDSNFIIGKITLPFKKEWQRLYLEWQNTTIKDDYEFLKSFFNVKSITKLHKKVRKDFSLPISTNEGKFLVKRKTWDNNFIYQILNDSDSRVDGTKPFIPAFDISKNEIVEAIIDSFTSKNIFWLPKNIELQNVDKIFLL

SEQ ID NO: 437 - protein, 158 aa, Francisella tularensis
MIDFLLELDPCITIPPYLDNNNRKPPKCQSLILNPKFLDNQYPNWQQYLQELKKLQSIQDYLDSFETDLKDLKSSKDQPYFVEYKSSNQQMASGQRDYKDLDARILQFIFDRVKASDELLLNEIYFQAKKLKQKASSELEKLESSKKLDEVIANSQLS

SEQ ID NO: 438 - protein, 878 aa, Francisella tularensis
MLNDLAGVLQVSRNQLLSSVEEWFQQAQRVGEISKSQDEQIFEWLKSFKIASYCKAAVEMQKQYRGTLKNAIQTAIFRQSENINKNKNKNKNTGNQQQALSENSKDVKSLTADEKKLLKLIENIAKASQKIGESLGLNDKQIKKFNSIYNFAQIQQIAFAERKGNANTCAVYSADNAHRMQQIKITELVEDNKDNIILSAKAQRLPAIPTRIVDGAVKKMATILAKNIVDDNWQNIKQVLSAKHQLHIPIITESNAFEFEPALADVKGKSLKDRRKKALERISPENIFKDKNNRIKEFAKGISAYSGANLTDGDFDGAKEELDHIIPRSYKKYGTLNDEVNLICVTRDDNKNKGKRIFCLNDLANNYKLKQFETTDDLEIEKKIADTIWDASKQDFKFGNYRSFINLIPQEQKAFRYALFLADENSIKQAVIRAINNRNRTFVNGTQRYFAEVLANNIYLRAKKENLNTDKISFDYFGIPTIGNGRGIADIRQLYEKVDSDIQAYAKGDKPQASYSHLIDAMIAFCVAADEHRNDGSIGLEIDKNYSLYPLDKNTGEVFTKDIFSQIKITDNEFSDKKLVRKKATEGFNTHRQMTRDGIYAENYLPILIHKELDEVRKGYTWGNSEELKIHKGKKYNIQQLNNIVYCLKFIDKSISIDIQISTLEELRNILTTNNIAATAEYYYINLKNQKLHEYYIENYNTALDYKKYSKEMEFLRSLAYRSERVKIKSIDDVKQVLDKDSNFIIGKITLPFKKEWQRLYLEWQNTTIKDDYEFLKSFFNVKSINKLHKKVRKDFSLPISTNEGKFLVKRKTWDNNFIYQILNDSDSRVDGTKPFIPAFDISKNEIVEAIIDSFTSKNIFWLPKNIELQKVDKIFLL

SEQ ID NO: 439 - protein, 292 aa, Francisella tularensis
MLNDLAGVLQVSRNQLLSSVEEWFQQAQRVGEISKSQDEQIFEWLKSFKIASYCKAAVEMQKQYRGTLKNAIQTAIFRQSENINKNKNKNTGNQQQALSENSKDVKSLTADEKKLLKLIENIAKASQKIGESLGLNDKQIKKFNSIYNFAQIQQIAFAERKGNANTCAVYSADNAHRMQQIKITELVEDNKDNIILSAKAQRLPAIPTRIVDGAVKKMVTILAKNIVDDNWQNIKQVLSAKHQLHIPIITESNAFEFEPALADVKGKSLKDRRKKALERISPENIFKDKNIC

SEQ ID NO: 440 - protein, 53 aa, Francisella tularensis
MNHSLLKSRYPDKVLEILKQSTIIEFESSGFNKTIKEMLGMTLAGIYNETSNN

SEQ ID NO: 441 - protein, 393 aa, Francisella tularensis
MNVKILPIAIDLDVKNTGVFSAFYQKGTSLEKLDNKNGKVYELSKDSYTLLMNNRTAQRHQRRGIDRKQLVKRLFKLVWTEQLNLEWDKDTQQAISFLFNRRGFSFITDGYSTEYLNIVPEQVKAILMDIFDDYNGEDDLDSYLKLATEQESKISEIYNKLMQKILEFKLRKLCTDIKDDKVSTKTLKEITSYEFELLADYLANYSESLKTQKFSYTDKQGNLKELSYYHHDKYNIQEFLKRHATINDEILDTLLTDDFDIWNFNFEKFDFDKNEEKLQNQEDKDHTQAYLHHFVFAVNKIKSEMASGGRHRSQYFQEITNVLDENNHQEGYLKNFCENLHNKKYSNLSVKNLVNLVGNLSNLELKPLRKYFNDKNLIIGMSKSLQKLIATGY

SEQ ID NO: 442 - protein, 1629 aa, Francisella tularensis
MNVKILPIAIDLGVKNTGVFSAFYQKGTSLERLDNKNGKVYELSKDSYTLLMNNRTARRHQRRGIDRKQLVKRLFKLIWTEQLNLEWDKDTQQAISFLFNRRGFSFITDGYSPEYLNIVPEQVKAILMDIFDDYNGEDDLDSYLKLATEQESKISEIYNKLMQKILEFKLRKLCTDIKDDKVSTKTLKEITSYEFELLADYLANYSEILKTQKFSYTDKQGNLKELSYYHHDKYNIQEFLKRHATINDEILDTLLTDDLDIWNFNFEKFDFDKNEEKLQNQEDKDHTQAHLHHFVFAVNKIKSEMASGGRHRGQYFQEITNVLDENNHQEGYLKNFCENLHNKKYSNLSVKNLVNLIGNLSNLELKPLRKYFNDKIHAKADHWDEQKFTETYCHWILGEWRVGVKDQDKKDGAKYSYKDLCNELKQKVTKAGLVDFLLELDPCRTIPPYLDNNNRKPPKCQSLILNPKFLDNQYPNWQQYLQELKKLQSIQNYLESFETDLKVLKSSKDQPYFVEYKSSNQQIASGQRDYKDLDARILQFIFDRVKASDELLLNEIYFQAKKLKQKASSELEKLESSKKLDEVIANSQLSQILKSQHTNGIFEQGTFLHLVCKYYKQRQRARDSRLYIMPEYRYDKKLDKYNNTGRFDDDNQLLTYCNHKPRQKRYQLLNDLAGVLQVSPNFLKDKIGSDDDLFISKWLVEHIRGFKKACEDSLKIQKDNRGLLNHKINIARNTKGKCEKEIFNLICKIEGSEDKKGNYKHGLAYELGVLLFGEPNEASKPEFDRKIKKFNSIYSFAQIQQIAFAERKGNANTCAVCSADNAHRMQQIKITEPVEDNKDKIILSAKAQRLPAIPTRIVDGAVKKMATILAKNIVDDNWQNIKQVLSAKHQLHIPIITESNAFEFEPALADVKGKSIKDRRKKALERISPENIFKDKNNRIKEFAKGISAYSGDNLASGDFDGAKEELDHIIPRSHKKYGTLNDEANLICVTRDDNKNKGNRIFCLHDLANNYKLKQFETTDDLEIEKKIADTIWDASKKDFKFGNYRSFINLTPQEQKAFRHALFLADENPIKQAVIRAINNRNRTFVNGTQRYFAEVLANNIYLRAKKENLNTDKISFDYFGIPTIGNGRGIVEIRQLYEKVDSDIQAYAKGDKPQASYSHLIDAMLAFCIAADEHRNDGSIGLEIDKNYSLYPLDKNTGEVFTKDIFSQIKITNNEFSDKKLVRKKATEGFNTHRQMTRDGIYAENYLPILIHKELDEVRKGYTWGNSEELKIHKGKKYDIQQLNNLVYCLKFIDKSISIDIQISTLEELRNILTTNNIATTAEYYYINLKTQKLHEYYIENYNTALGYKKYTKEMEFLRSLAYRSERVKIKSIDDVKQVLDKDSNFIIGKITLPFKKEWQRLYREWQNTTIKDDYEFLKSFFNVKSITKLHKKVRKDFSLPISTNEGKFLVKRKTWDNNFIYQILNDSDSRVDGTKPFIPAFDISKNEIVEAIIDSFTSKNIFWLPKNIELQKVDNKNIFAIDTSKWFEVETPSDLRDIGVATIQYKIDNNSRPKVRVKLDYVIDDDSKINYFTNHSLLKSRYPDKVLEILKQSTIIEFESSGFNKTIKEMLGMTLAGIYNETSNN

SEQ ID NO: 443 - protein, 285 aa, Francisella tularensis
MTRDGIYAENYLPILIHKELDEVRKGYTWGNSEELKIHKGKKYNIQQLNNIVYCLKFIDKSISIDIQISTLEELRNILTTNNIAATAEYYYINLKNQKLHEYYIENYNTALDYKKYSKEMEFLRSLAYRSERVKIKSIDDVKQVLDKDSNFIIGKITLPFKKEWQRLYLEWQNTTIKDDYEFLKSFFNVKSITKLHKKVRKDFSLPISTNEGKFLVKRKTWDNNFIYQILNDSDSRVDGTKPFIPAFDISKNEIVEAIIDSFTSKNIFWLPKNIELQKVDKIFLL

SEQ ID NO: 444 - protein, 1323 aa, Fructobacillus fructosus
MVYDVGLDIGTGSVGWVALDENGKLARAKGKNLVGVRLFDTAQTAADRRGFRTTRRRLSRRKWRLRLLDELFSAEINEIDSSFFQRLKYSYVHPKDEENKAHYYGGYLFPTEEETKKFHRSYPTIYHLRQELMAQPNKRFDIREIYLAIHHLVKYRGHFLSSQEKITIGSTYNPEDLANAIEVYADEKGLSWELNNPEQLTEIISGEAGYGLNKSMKADEALKLFEFDNNQDKVAIKTLLAGLTGNQIDFAKLFGKDISDKDEAKLWKLKLDDEALEEKSQTILSQLTDEEIELFHAVVQAYDGFVLIGLLNGADSVSAAMVQLYDQHREDRKLLKSLAQKAGLKHKRFSEIYEQLALATDEATIKNGISTARELVEESNLSKEVKEDTLRRLDENEFLPKQRTKANSVIPHQLHLAELQKILQNQGQYYPFLLDTFEKEDGQDNKIEELLRFRIPYYVGPLVTKKDVEHAGGDADNHWVERNEGFEKSRVTPWNFDKVFNRDKAARDFIERLTGNDTYLIGEKTLPQNSLRYQLFTVLNELNNVRVNGKKFDSKTKADLINDLFKARKTVSLSALKDYLKAQGKGDVTITGLADESKFNSSLSSYNDLKKTFDAEYLENEDNQETLEKIIEIQTVFEDSKIASRELSKLPLDDDQVKKLSQTHYTGWGRLSEKLLDSKIIDERGQKVSILDKLKSTSQNFMSIINNDKYGVQAWITEQNTGSSKLTFDEKVNELTTSPANKRGIKQSFAVLNDIKKAMKEEPRRVYLEFAREDQTSVRSVPRYNQLKEKYQSKSLSEEAKVLKKTLDGNKNKMSDDRYFLYFQQQGKDMYTGRPINFERLSQDYDIDHIIPQAFTKDDSLDNRVLVSRPENARKSDSFAYTDEVQKQDGSLWTSLLKSGFINRKKYERLTKAGKYLDGQKTGFIARQLVETRQIIKNVASLIEGEYENSKAVAIRSEITADMRLLVGIKKHREINSFHHAFDALLITAAGQYMQNRYPDRDSTNVYNEFDRYTNDYLKNLRQLSSRDEVRRLKSFGFVVGTMRKGNEDWSEENTSYLRKVMMFKNILTTKKTEKDRGPLNKETIFSPKSGKKLIPLNSKRSDTALYGGYSNVYSAYMTLVRANGKNLLIKIPISIANQIEVGNLKINDYIVNNPAIKKFEKILISKLPLGQLVNEDGNLIYLASNEYRHNAKQLWLSTTDADKIASISENSSDEELLEAYDILTSENVKNRFPFFKKDIDKLSQVRDEFLDSDKRIAVIQTILRGLQIDAAYQAPVKIISKKVSDWHKLQQSGGIKLSDNSEMIYQSATGIFETRVKISDLL

SEQ ID NO: 445 - protein, 1367 aa, Fusobacterium sp.
MKKQKFSDYYLGFDIGTNSVGWCVTDLDYNVLRFNKKDMWGSRLFDEAKTAAERRVQRNSRRRLKRRKWRLNLLEEIFSDEIMKIDSNFFRRLKESSLWLEDKNSKEKFTLFNDDNYKDYDFYKQYPTIFHLRDELIKNPEKKDIRLIYLALHSIFKSRGHFLFEGQNLKEIKNFETLYNNLISFLEDNGINKSIDKDNIKKLEKIICDSGKGLKDKEKEFKEIFNSDKQLVAIFKLSVGSSVSLNDLFDTDEYKKEEVEKEKISFREQIYEDDKPIYYSILGEKIELLDIAKSFYDFMVLNNILSDSNYISEAKVKLYEEHKKDLKNLKYIIRKYNKENYDKLFKDKNENNYPAYIGLNKEKGKKEVVEKSGLKIDDLIKVIKGYLPKPERIEEKDKTIFNEILNKIELKTILPKQRISDNGTLPYQIHEVELEKILENQSKYYDFLNYEENGVSTKDKLLKTFKFRIPYYVGPLNSYHKDKGGNSWIVRKEEGKILPWNFEQKVDIEKSAEEFIKRMTNKCTYLNGEDVIPKDSFLYSEYIILNELNKVQVNDEFLNEENKRKIIDELFKENKKVSEKKFKEYLLVNQIANRTVELKGIKDSFNSNYVSYIKFKDIFGEKLNLDIYKEISEKSILWKCLYGDDKKIFEKKIKNEYGDILNKDEIKKINSFKFNTWGRLSEKLLTGIEFINLETGECYSSVMEALRRTNYNLMELLSSKFTLQESIDNGNKEMNEVSYRDLIEESYVSPSLKRAILQTLKIYEEIKKITGRVPKKVFIEMARGGDETMKNKKIPARQEQLKKLYDSCGNDIANFSIDIKKMKSSLSSYDNNSLRQKKLYLYYLQFGKCMYTGREIDLDRLLQNNDTYDIDHIYPRSKVIKDDSFDNLVLVLKNENAEKSNEYPVKKEIQEKMKSFWRFLKEKNFISDEKYKRLTGKDDFELRGFMARQLVNVRQTTKEVGKILQQIEPEIKIVYSKAEIASSFREMFDFIKVRELNDTHHAKDAYLNIVAGNVYNTKFTEKPYRYLQEIKENYDVKKIYNYDIKNAWDKENSLEIVKKNMKKNTVNITRFIKEEKGQLFDLNPIKKGETSNEIISIKPKLYNGKEEKLNEKYGYYKSLNPAYFLYVEHKEKNKRIKSFERVNLVDVNNIKDEKSLVKYLIENKKLVEPRLIKKVYKRQVILINDYPYSIVALDSNKLMDFENLKPLFLENKYEKILKNVIKFLEDNQGKSEENYKFIYLKKKDRYEKNETLESVKDRYNLEFNEMYDKFLEKLDSKDYKNYINNKKYKNLLDVKEKFIKLNLFDKAFTLKSFLDLFNRKTMADFSKVGLTKYLGKIQKISSNVLSKNELYLLEESVTGLFVKKIKL

SEQ ID NO: 446 - protein, 1367 aa, Fusobacterium sp.
MKKQKFSDYYLGFDIGTNSVGWCVTDLDYNVLRFNKKDMWGSRLFDEAKTAAERRVQRNSRRRLKRRKWRLNLLEEIFSDEIMKIDSNFFRRLKESSLWLEDKNSKEKFTLFNDDNYKDYDFYKQYPTIFHLRDELIKNPEKKDIRLIYLALHSIFKSRGHFLFEGQNLKEIKNFETLYNNLISFLEDNGINKSIDKDNIKKLEKIICDSGKGLKDKEKEFKEIFNSDKQLVAIFKLSVGSSVSLNDLFDTDEYKKEEVEKEKISFREQIYEDDKPIYYSILGEKIELLDIAKSFYDFMVLNNILSDSNYISEAKVKLYEEHKKDLKNLKYIIRKYNKENYDKLFKDKNENNYPAYIGLNKEKGKKEVVEKSGLKIDDLIKVIKGYLPKPERIEEKDKIIFNEILNKIELKTILPKQRISDNGTLPYQIHEVELEKILENQSKYYDFLNYEENGVSTKDKLLKTFKFRIPYYVGPLNSYHKDKGGNSWIVRKEEGKILPWNFEQKVDIEKSAEEFIKRMTNKCTYLNGEDVIPKDSFLYSEYIILNELNKVQVNDEFLNEENKRKIIDELFKENKKVSEKKFKEYLLVNQIANRTVELKGIKDSFNSNYVSYIKFKDIFGEKLNLDIYKEISEKSILWKCLYGDDKKIFEKKIKNEYGDILNKDEIKKINSFKFNTWGRLSEKLLTGIEFINLETGECYSSVMEALRRTNYNLMELLSSKFTLQESIDNGNKEMNEVSYRDLIEESYVSPSLKRAILQTLKIYEEIKKITGRVPKKVFIEMARGGDETMKNKKIPARQEQLKKLYDSCGNDIANFSIDIKKMKSSLSSYDNNSLRQKKLYLYYLQFGKCMYTGREIDLDRLLQNNDTYDIDHIYPRSKVIKDDSFDNLVLVLKNENAEKSNEYPVKKEIQEKMKSFWRFLKEKNFISDEKYKRLTGKDDFELRGFMARQLVNVRQTTKEVGKILQQIEPEIKIVYSKAEIASSFREMFDFIKVRELNDTHHAKDAYLNIVAGNVYNTKFTEKPYRYLQEIKENYDVKKIYNYDIKNAWDKENSLEIVKKNMKKNTVNITRFIKEEKGQLFDLNPIKKGETSNEIISIKPKLYNGKEEKLNEKYGYYKSLNPAYFLYVEHKEKNKRIKSFERVNLVDVNNIKDEKSLVKYLIENKKLVEPRLIKKVYKRQVILINDYPYSIVALDSNKLMDFENLKPLFLENKYEKILKNVIKFLEDNQGKSEENYKFIYLKKKDRYEKNETLESVKDRYNLEFNEMYDKFLEKLDSKDYKNYINNKKYKNLLDVKEKFIKLNLFDKAFTLKSFLDLFNRKTMADFSKVGLTKYLGKIQKISSNVLSKNELYLLEESVTGLFVKKIKL

SEQ ID NO: 447 - protein, 1367 aa, Fusobacterium sp.
MKKQQFSDYYLGFDIGTNSVGWCVTDFNYNVLRFNKKDMWGSRLFDEAKTAAERRVQRNSRRRLKRRKWRLNLLEEIFSDEILKIDSNFFRRLKESSLWLEDKSSKEKFTLFNDDNYKDYDFYKQYPTIFHLRNELIKNPEKKDIRLVYLALHSIFKSRGHFLFEGQNLKDIKNFETLYNNLMAFLEDNDIYKNIDSSYIGNLENIICDSKKGLKDKEKEFKEIFNSDKQLVGFFKLSVGSSVSLNDLFDTDEYKKGEVEKEKISFREQIYEDDKPIYYSILGEKIEFLDIAKSFYDFMVLNNILADSQYISEAKVKLYDEHKRDLKNLKYIIRKYNKENYDKLFKDKNESNYSAYIGLNKEKGKKEVIEKSRLKIDDFAKIIKGYLPKAEKIDEKDRSIFNEILDKIELKTILPKQRISDNGTLPYQIHEAELEKILENQAKYYDFLNHEENGISTKDKLLMTFKFRIPYYVGPLNSYHKNKGGNSWIVRKEEGKILPWNFEQKVDIEKSAEEFIKRMTNKCTYLNGEDVIPKDSFLYSEYIILNELNKVQVNDEFLNKEIKKKIIEDLFKKSKKISEKNFREYLLVNQITNKTVELKGVKDAFNSNYVSYIKFKDIFGDKLNLDIYKEISEKSILWKCLYGDDKKIFEKKIKSVYGDILTKDEIKKINSFKFNTWGRLSEKLLTEIEFIDLETGECYSSVMDALRRTNYNLMELLSSKFTLQENIDNENKEVSEFSYRDLVEESYVSPSLKRAILQTLKIYEEIRKITGRIPKKVFIEMARGGDETMKNKKIPARQEQLKKLYDSCGKDISNFSIDIKEMKNSLNSYDNNSLRQKKLYLYYLQFGKCMYTGKEIDLNRLLQNNDTYDIDHIYPRSKVIKDDSFDNLVLVLKNENAEKSNEYPLKKEIQEKMKSFWKFLKEKNFISDEKYKRLTGKDEFELRGFMARQLVNVRQTTKEAGKILQQIEPEIKIVYSKAEIASSFREMFDFIKVRELNDTHHAKDAYLNIVAGNVYNTKFTEKPYRYLQEIKENYDVKKIYNYDIKNAWDKEKSLEIVKKNMEKNTVNITRFIKEEKGQLFDLNPIRKGETSNEIIAIKPKFYEGSTEKLNEKYGYYKSLNPAYFIYVEHKEKNKIIRSFERVNLVDVNKIKDEKSLIKYLIENKGLIEPKVIKKVYKRQVILINNFPYSIVALDSNKLMDFENLKPLFLERKYEKILKNAIKFLEDNQGKTEEYYKFLYLKKKDRNEKNETIDSVKERYNIEFNEMYDKFLEKLDSKDYKNYINNKKYSELVNVKEKFIKLNLFDKAFTLKSFLDLFNRKTMADFSKVGLTKYLGKIQKISSNVLSKNELHLLEESVTGLFVKKIKL

SEQ ID NO: 448 - protein, 1391 aa, Galbibacter sp.
MKTILGLDLGTNSIGWALVKEAENENEVSDIIKLGVRVNPLTVDELTNFEGGKAYSNNAERTLKRGARRNLQRYKLRRENLIEILLKNGLINKDTALTEVGKETTHQTLKLRSKSANEKVSLEDLAKILLSINKKRGYKSSRKVNAEDDGVAIDGMEVAKLLYDENMTPGEYVLRLLESGKKHLPDFYRSDLQEEFNLVWKKQSEFYPLILTKELFFELHGKNKSQTWAICKEPLGIVGVKLKGSAKEQKFARYRLRKEALTQQIELEHLAIVLQDINNDSNKSSGYLGAISDRSKELFFNKETVGQYQYKQLQKDPNTSLKNQVFYRQDYLDEFEVIWRNQAKFYPQLTNELKQEIRDVVIFYQRKLKSQKNLISFCQFESTQQNYVEKETGKTKIRTIGRRVIPRSSPLFQEFKIWQSLNNLKFVNSESNQIIQFIELEDDVKKVVFDELNLRGDLKPNQVLKILSKYMKIGKLTQWKCNLEEIEGNRTNSALYNVFQMIAEEEGYGFNWGKKSALEIKSELKAIFSSIGINDSILDFDFSKKLDQQLSYQLWHLLYSAEEGNSKITEEDKFTYGNTGVALKKKLHLKFGFKPEYSTLISNLRFTSDYGNLSSKAISKILPFLRDGSDYSKACQYAGYNHSNSLSADELDNRELKPKLELLKKNSLRNPVVEKILNQMVNVVNQVIDNYGKPDEVRIELARELKKSAKERSQMTKNISDATRRNAEIKKYLSKEFGIPNPTKGDVIRYRLWEELASNGYKDLFRDKYIPKEKLFSNEIDIEHIIPKALLFDDSFSNKTLAFKVDNLKKADRTAFDFMSTDFSKDVDSYIGRIETLHKDGKISSSKYKKLMIPKSKLVDGFIERDLRNTQYIAKQARKMLLEVFKTVVPTTGKITDKLREDWDLINVMKELNFPKYKALGLTKKIERFDVGSEKIKSINVIEGWSKRNDHRHHAMDALAVAFTTHNHIQYLNYLNARKDIHHEMHGTIKSIENQIIGKDVMGKRRFIPPISDLRMKAKLQIESILISFKNKNKVVTWSVNKTKLKGKDNYNKRRQLTPRGQLHKETVYGKIKLIDPKPLKLNNKFTLVRASMIVDKVHREIVLQHLSKYDNNSEVAFDSKTIKIDPILIEGIGLKEVVCYEDVFKIRKKISGDNFKNEKHLEKVIDEKVKQILKDRVIKFQGNFKEAFSNLEENPIWLNKSKGIAVKSVAIKGVNNAESLHEGKDHFGDQILDKNKKQIPVDFVSTGNNHHVGIYEDKDGNLQERVVSFFEAVTRVNEGLPIIDKTYNSDIGWKFKFTMKQNEMFVFPSDDFDPNEFDLTDGKNAAKISPNLYRVQKIATKNYMFRHHLETVVTNDLEFTYKSIRSTGWLRNLVKVRINHLGEIVYVGEY

SEQ ID NO: 449 - protein, 1186 aa, Gardnerella vaginalis
MEGNISYAIGIDVGLNSVGLAAIRLDDYGEPIRILKAMSVIHDAGIDPNGAKESDTRKAISGVARRVRRLYRQRRRRLQKLDFLLQSLGWPVVENKDLDFSDSFIPWIFRAKLADEYIADEEQRKQMLSVAIRHIARHRGWRNPYQSIKSMMQETEYSEFYNELLKNIEKLAPGVGCEGSTPAQLVRDYLLSQQGKASRRLRITTGGRRKNHPHSLDPVLPRKLMQSDNMLEILNIFNVQHIDDKYVREQIINAVFYAESPRGSAENRVGKDAITGKGKRALKASLAFQKYRIISTISNLRIRENSKERCLTIEEKQNVYKLLTTSIDKSSKRKSAEAPLYTWIDVADCLGIERYKLRGVGSQIGDGESVGNRPPMLNSELAILYANNKSLGQSLITWWLASNRTQEDKEALIEILSNTVDIEAIHDNPEYQDKYGSAIAFIDSMNETEIAALENISLPDGRAAYSLETLDELNKQMLETDDDLFEARKKLFNLPNNWRPAEAPIAEPTGNPSVDRVLKIVHRFLISAKNRWGNPERINIEHVRSGFQSKKMANSYKELLDKRTEGKENLKAMMRNSLHLGTSDSISDADIRRYEAVQRQNGQCLYCGSEITYHTCELDHIVPRKGPGSTNTRENLVATCSSCNAQKCNTPFATWCEQSTYCKNHDISADSAINRVRAFIFPPNSYDKRGANQFKKEVIARLKQKVGDEAFDNRSIESVAWMANELHRRIDWYYNSQNYQTNNGISDISNKAQTNVGVYAGSLTAIARRMSGIDGKLEFFDGRRKTRFDRRHHAVDASVIAMMTPGIAQILAIKCNLRETQLLQGNKVVPGGIDWKEYPTANDQGYQQYANWSVRMNALLKLLNEEMRADRIAVVNSIRLRYSNSSVHQYEVNALLKLHVGDEIDSETIRRSSTPALYCALTRNPDYDVNNGFPENPGRTILLHNKKLNADDSITFFKAQAVQLFVREGSAKIGNSIHHLRIYEYFEKLKSGKIKKSYGMIRVFQNDLHRHIHEDLFSCDLPEQSISMRYADTKVAHAVQTGNANYLGYLVPGDEIIVDFSHITLSENIGKFVEFLNKIGADCTAYRHWVVVGTDTEKVLILKPSMISSEGIDKLYSNCERNNFDYSSYEKSINEILAGKGWRVSVNVLAQYKAATIRRNALGEVRWASRSHLPISWSWDTGENRE

SEQ ID NO: 450 - protein, 1186 aa, Gardnerella vaginalis
MEGNISYAIGIDVGLNSVGLAAIRLDNNGEPIRILKAMSVIHDAGIDPNGAKESDTRKAISGVARRVRRLYRQRRRRLQKLDFLLHSLGFPVVENKDLDFSDSFIPWIFRAKLADEYIADEKQRKQMLSVAIRHIARHRGWRNPYQSIKSMTQETEYSEFYNELLKNIEKFAPGVGCEGSTPAQLVRDYLLLQQGKASRRLRITTDEKRKNHPNSLNPILPRKLMQSDNMLEILNIFNVQHIDDKYVREQIINAVFYAKSPRGSAENRVGKDAITGKGKRALKASLAFQKYRIISTISNLRIRENSKERCLTIEEKQSVYKLLTTSTDESSKEKSAEAPLYTWIDVADCLGIERYKLRGVGSQIGDGESVGNRPPMLNSELAIIYANNKSLGKSLLTWWLDANRTQEDKEALIEILSNTVDIEAIHDNPEYQDKYGSAIAFIDSMDETEIAALENISLPDGRAAYSLETLDKLNKQMLETDDDLFEARKKLFNLPNNWRPSEAPIAEPTGNPSVDRVLKIVHRFLISAKNRWGNPERINIEHVRSGFKSKKMANSYKELLDKRTKGKENLKAMMRNSLHLGMSDSISDADIRRYEAVQRQNGQCLYCGSEITYHTCELDHIVPRKGPGSTNTRENLVATCSLCNAQKCNTPFSTWCEQSTYCKNHDISVDSAINRVRAFIFPPNSYDKRGANQFKKEVIARLKQKVGDEAFDNRSIESVAWMANELHRRIDWYYNSQNYQTNNGISDITNKAQTNVGVYAGSLTAIARRMSGIDGKLEFFDGRRKTRFDRRHHAVDASVIAMMTPGIAQILAIKCNLRETQLLQGNKVVPGGIDWKEYPTANDQGYQQYANWSVRMNALLKLLNEEMRADRIAVVNSIRLRYNNSSVHQYKVNALLKLHVGDEIDSGTIRRSSTPALYCALTRNPDYDVNNGLPENPNRAILLHDKKLNADDSITFFKAQAVQLFVREGSAEIGSSTHHLRIYEYFKKLKSGKIKKSYGMIRVFQNDLHRHIHEDLFSCDLPEQSISMRYADTEVAHAVQTGNSNYLGYLVPGDEIIVDFSHVKLSGNIGTFVEFLNKIGANCAAYNHWVVVGTDTEKVLILKPSMISSEGIDKLYSNCKRNNFDYSSYEKSINEILVGKGWRVSVNVLAKYNAETIRRNALGEVRWTSRSHLPISWSWNTGENRE

SEQ ID NO: 451 - protein, 1258 aa, Gemella haemolysans
MTEENPDIRKVFLAIHHILKNRGHFLLQGQSFKEGNLNNLIKELLNLDILHISIEITEENINKITEIALEKKTLTDKVNDLKKIYPKEKQLLEAFRLIFGGKTSLDKLFAIDEYKELDASVKSVSFKEKIYEEVRHDYEQVLSNYIELLDLAKLVYDSIILSDIKKEGKTLSESKVELYHKHREDLTKLKTLVKNDSKLSEDKKVELYSAIFKEDKDKGTNYVNYIRKSEEGKGCNYEDFKKFLVKELAKLEESSAKEEILRDLELELFLPLQRTKDNSVVPYQIHKEELVKILDNAAKYHKFLNEKDDSGYSIIEKVIQLLEFRIPYYVGPLNSSKKAKVDGFAWSVRNKGYENTPVTPWNYEKVIDESASAEKFITNLTNKCTYLKGEDVLPKSSLLYSEFALLNELNALKYDGNRISLEARNVIIEKLFKEQGKKVTKTSIKNLLKAEGYIDGKGEITGIDITVKNDLKSYRDFKKILGDKFNTEHVENIILWITLYGESRKLIKAKIEAVYGDIYSKEEIAKMSRLVYKDWGRFSRKLLTELVSKKLYNEETGECLNIIGAMRQNNILFMELLADRFDYSQQIIDYNKELQKEVTEITPEILDDLYVSPSVKRSIWQTVRIVEELKKIIGCAPAKIFVETTRSNQDKKKPTDSRKKQLELFYKAVKKDVKDLEKEIGSLNFDKLNERLSSVEPSKLKAKKLYLYYTQLGRCMYSGETIDITQLNTTAYDIDHIYPQSKVKDDSFTNTVLVKREYNAAKTDRYPLGSDIQTPSNRRFWKFLKEKGLITDEKYNRLVRTEEFSDEELTGFIARQLVETSQSVKAVAGILGELNPKTSICYSKAENVSSFRQNFGKIKEGNRKSDNTEQLIKVREINDYHHAKDAYLNVVVGNVYDTKFTRNVFNFIKDKKDGRKYSLNNVFYENVSNSNNVAWELNKTVHQVEKVMNNNNILVTRRTSEQKGGLFDATVYKAKVAAKAKEGVYYPLKTSDPVVNDVTKYGGFTKVKIAYYSIFEYTLVNKKGEEKITRIIPIPIYVSQNIKDDSTLLEFGKTQINIKSGEEVKDFKLKYRKLCIGDLVKINNFFNFIGGKTNDSFVYDGAVQVTLDTESERYIKTLSKYQNWKKENKDGELWESITKEKNTELYNLLVEKMNSGIFIKKKPNKFNELNSEEIRNNFSSISLEEQAKVLLEVLNLLTNKKSIFDLKSINITAARGKISFNLSNLSQFSIIEQSVAGFYEKEITIIGDKENDMENNNC

SEQ ID NO: 452 - protein, 1054 aa, Haemophilus parainfluenzae
MENKNLNYILGLDLGIASVGWAVVEIDEKENPLRLIDVGVRTFERAEVPKTGESLALSRRLARSARRLTQRRVARLKKAKRLLKSENILLSTDERLPHQVWQLRVEGLDHKLERQEWAAVLLHLIKHRGYLSQRKNESKSENKELGALLSGVDNNHKLLQQATYRSPAELAVKKFEVEEGHIRNQQGAYTHTFSRLDLLAEMELLFSRQQHFGNPFASEKLLENLTALLMWQKPALSGEAILKMLGKCTFEDEYKAAKNTYSAERFVWITKLNNLRIQENGLERALNDNERLALMEQPYDKNRLFYSQVRSILKLSDEAIFKGLRYSGEDKKAIETKAVLMEMKAYHQIRKVLEGNNLKAEWAELKANPTLLDEIGTAFSLYKTDEDISAYLAGKLSQPVLNALLENLSFDKFIQLSLKALYKLLPLMQQGLRYDEACREIYGDHYGKKTEENHHFLPQIPADEIRNPVVLRTLTQARKVINGVVRLYGSPARIHIETGREVGKSYKDRRELEKRQEENRKQRENAIKEFKEYFPHFAGEPKAKDILKMRLYKQQNAKCLYSGKPIELHRLLEKGYVEVDHALPFSRTWDDSFNNKVLVLANENQNKGNLTPFEWLDGKHNSERWRAFKALVETSAFPYAKKQRILSQKLDEKGFIERNLNDTRYVARFLCNFIADNMHLTGEGKRKVFASNGQITALLRSRWGLAKSREDNDRHHALDAVVVACSTVAMQQKITRFVRFEAGDVFTGERIDRETGEIIPLHFPTPWQFFKQEVEIRIFSDNPKLELENRLPDRPQANHEFVQPLFVSRMPTRKMTGQGHMETVKSAKRLNEGISVIKMPLTKLKLKDLELMVNREREKDLYDTLKARLEAFNDDPAKAFAEPFIKKGGAIVKSVRVEQIQKSGVLVREGNGVADNASMVRVDVFTKGGKYFLVPIYTWQVAKGILPNKAATQYKDEEDWEVMDNSATFKFSLHPNDLVKLVTKKKTILGYFNGLNRATGNIDIKEHDLDKSKGKQGIFEGVGIKLALSFEKYQVDELGKNIRLCKPSKRQPVR

SEQ ID NO: 453 - protein, 1052 aa, Haemophilus parainfluenzae]
MKNTSLNYVLGLDLGISSVGWAVVEIDEKENPLSLIDVGVRTFERAETQKGESLALARRLARSARRLTQRRVARLKKAKRLLKSENILLSTDECLPHQVWQLRVEGLERKLERQEWAAVLLHLIKHRGYLSQRKNESKSENKELGALLSGVANNHKLLQQTTYRTPAELAVKKFEVEEGHIRNQQGSYTHTFSRLDLLSEMELLFSRQQHFGNPFTSEKLLENLTALLMWQKPALSGDAILKMLGKCTFENEYKAAKHTYSAERFIWITKLNNLRIQENGLERALNDNERLALMKQPYEKAKLTYAQVRSILNLSDEAIFKGLRYSGEDKKTSETKTVLMEMKAYHQIRLALEKNDLKTEWAELKVNSSLLDEIGTAFSLYKTDEDISTCLAGKLSQPVLNALLENLNFDKFIQLSLKALHKILPLMQQGLRYDEACAEIYGDHYGKKTEENHLLLPQIPADEIRNPVVLRTLTQARKVINGVVRLYSSPARIHIETGREVGKSYQDRRELEKRQEENRKQREKAISEIKTLFPNFSGEPKAKDILKMRLYYQQNAKCLYSGKPLELHRLLEQGYVEIDHALPFSRTWDDSFNNKVLVLANENQNKGNLTPFEWLDGKNNSERWKAFKALVETSAFPYTKKQRILSQKLDEKGFIERNLNDTRYVARFLCNFIADNMHLTGEGKRKVFASNGQITALLRGRWGLAKSREDNDRHHALDAVVVACSTVSMQQKITRFVRFEEGNVFTGERIDRETGEIIPLHFPAPWKFFREEVEIRIFSDNPKLELENRLIARPQANHEFVQPLFVSRMPTRKMIGQGHMETIKSAKRLNEGLSVIKMLLTKLRLKDLESMVNREREKELYEALKARLEAFNDEPAKAFAEPFMKKGGAIVKSVRVEQVQKSGVLVRDGNGVADNASMVRVDVFTKGGKYFLVPIYTWQVAKGILPNKAVIQGKNEEDWEVMDDATFRFSLHQNDLVKLVTKKKTIFGYFNGLNRATGNIDIKEHDLEKSKVKDGIHQSIGIKLALSFEKYQVDELGKNIRLCKSSKRQAVR

SEQ ID NO: 454 - protein, 121 aa, Haemophilus pittmaniae
MLNRRYAAKITRFVRFEAGDVFTGERIDRETGEIIPLHFPTPWQFFKQEVEIRIFSDNPKLELENRLPDRPQANHEFVQPLFVSRMPTRKMTGQGHMETVKSAKRLNEGISVIKMPLTKLN

SEQ ID NO: 455 - protein, 203 aa, Haemophilus pittmaniae
MVNREREKDLYDALKARLEAFNDDPAKAFAEPFIKKGGAIVKSVRVEQVQKSGVLVREGNGVADNASMVRVDVFTKDGKYFLVPIYTWQVAKGILPNKAATQYKDEEDWEVMDNSAIFKFSLHPNDLVKLVTKKKTILGYFNGLDRATGNIAIKEHDLEKSKAKGGIHQGVGIKLALSFEKYQIDELGKNIRLCNPSKCQSVR

SEQ ID NO: 456 - protein, 1052 aa, Haemophilus sputorum
MKNTSLNYVLGLDLGISSVGWAVVEIDEKENPLSLIDVGVRTFERAETQKGESLALARRLARSARRLTQRRVARLKKAKRLLKSENILLSTDECLPHQVWQLRVEGLERKLERQEWAAVLLHLIKHRGYLSQRKNESKSENKELGALLSGVANNHKLLQQTTYRTPAELAVKKFEVEEGHIRNQQGSYTHTFSRLDLLSEMELLFSRQQHFGNPFTSEKLLENLTALLMWQKPALSGDAILKMLGKCTFENEYKAAKHTYSAERFIWITKLNNLRIQENGLERALNDNERLALMKQPYEKAKLTYAQVRSILNLSDEAIFKGLRYSGEDKKTSETKTVLMEMKAYHQIRLALEKNDLKTEWAELKVNSSLLDEIGTAFSLYKTDEDISTCLAGKLSQPVLNALLENLNFDKFIQLSLKALHKILPLMQQGLRYDEACAEIYGDHYGKKTEENHLLLPQIPADEIRNPVVLRTLTQARKVINGVVRLYSSPARIHIETGREVGKSYQDRRELEKRQEENRKQREKAISEIKTLFPNFSGEPKAKDILKMRLYYQQNAKCLYSGKPLELHRLLEQGYVEIDHALPFSRTWDDSFNNKVLVLANENQNKGNLTPFEWLDGKNNSERWKAFKALVETSAFPYTKKQRILSQKLDEKGFIERNLNDTRYVARFLCNFIADNMHLTGEGKRKVFASNGQITALLRGRWGLAKSREDNDRHHALDAVVVACSTVSMQQKITRFVRFEEGNVFTGERIDRETGEIIPLHFPAPWKFFREEVEIRIFSDNPKLELENRLIARPQANHEFVQPLFVSRMPTRKMTGQGHMETIKSAKRLNEGLSVIKMLLTKLRLKDLESMVNREREKELYEALKARLEAFNDEPAKAFAEPFMKKGGAIVKSVRVEQVQKSGVLVRDGNGVADNASMVRVDVFTKGGKYFLVPIYTWQVAKGILPNKAVIQGKNEEDWEVMDDATFRFSLHQNDLVKLVTKKKTIFGYFNGLNRATGNIDIKEHDLEKSKVKDGIHQSIGIKLALSFEKYQVDELGKNIRLCKSSKRQAVR

SEQ ID NO: 457 - protein, 1338 aa, Helcococcus kunzii
MQDYYLGLDIGTNSVGWAVTDENYNLLRKKGKDLWGVRLFKEAQPATERRGHRSSRRRTIRKSLRKQLLRELFEEEINAIDKDFFLRLDESKYWLEDKKIEGKYSLFNDENFTDKDYYEKFPTIFHLRKALIESDDKEDIRLYFLAINQMMKRRGHFLIDGKLSNVEDITPFKECIQNLINEELDTEIETEFYDKAIKIVSDYSLKKTEKKNLIKDLVKETDSIEDSKKIINIFNLLISGKSKVNGIFDDEEILEKIKEDNKEDFYLTSEKYEENLEYFSQLLDYRFELISSLKSIYDYIILQEVLKGKKYLSYAQVERYKNHKEDLRKLKQLIKKYDKNGKIYYQIFRDENFKKGYVAYLGYYKKNKKNVPVKKCDYDTFSKNIKSTLDKICDKEDPLYIELIDKIEKGGFLLKQIVSTNSVIPHQVHELELDKILENLEKNYPSFKEISDGVSKIDKIKMIFNFRIPYYVGPLNDYHKDKVNSNTWIVKNEGFENENIRPWNFSKIVDEHACEEEFIKRMINECSYIPGEKVLPKSSLLYSEYMVLNELNNLRVNGDKLNPKIKKEIVENIYKKERKVTLKKIRNFLIINNYVDSKVEFSGLSDGIKANMSSYIDFAEILDDNFDNNMVEDLIEQITIHVGNVKLLTEKISNKYPNLEKKQINKIVNLKFKDWARFSRKLLVGIEGTEKETGEINTIIGFLRETNENFMELMSNRYTFSEEISEIKKKYIPNKLSKQIVDDLYVSPAVKKMIWQVLNINDELIKVLGKQPKKIFIEMARGKEEKPEVKDSRKNKLIELYKNLGKEGKEWLNRIEDKTEADFRNRALYLYYTQMGRCMYTGEIIDIERLYDKELYDLDHIIPRKMKKDDSIHKNLVLVTRNSNQYEKKDNYPVPEVIKSRENVRHLWYALKKKGLITEEKYNRLTRINPLSDKELSEFIERQLVETRQTTKVVKDLFENYYTDSKIVTVKAGLVSELRRDFEVLKCREINDLNHAHDAFLNIIVGDVWSKKFTSNPYNFVKKNREKYTLNNIFTKNQKDLRGNEIWNCAEGKKRIIKTLNKPSVLFSVENFEQTGQLFDQNIIGKQDYKEKTSYVPIKGDERLQDISKYGGYRGISGAYFFIVEHTEKNKRVKTIESLPIYMKSYVEENGLLDFCTNEMKLVDPKIIVKKLNYKSEIIVDGFKYLISGKTENRLSLETNEYLYWNHTQTTDIKKILNINEKIELEKYNGDIESERENIIKYIQIILEKFKLKPFIKRRNLPNIEINFADYETEKLLQLLVNLIPLTTKYVSPVDLTVISGSKYAGKVLIPKKISNLNEVIFISKSITGIYESRRRII

SEQ ID NO: 458 - protein, 1023 aa, Helicobacter cinaedi
MKIYSFDIGVASIGWAFIENEVLQDCGIRIFTKAENPKNGASLALPRREARGVRKRLARRRGRLNTIKQLLCKEFGLQLEDYLSNDGELPKAYTASKANPLKSPYELRTLALSQKLDSKDLVRVILHIAKHRGYGNKHAKDSKDTESGKVKKAIEFNRKTLAEKGYRSVGEYLYREFFQQSRISQNNGATEFINVRNKAGNYEHCVAQDMLKEELESILNAQRQFGFSLKQDFENKLLTKIFEQRPLKSFADKVGNCCFIAGEKRTPKDSLSAIEFIALSRTINTLINLSKESGEIYNRAIILQIVESTLKKGEISYKELREIIRLDERLRFKDPRLDYSREIKEAEKVKFLEFKQLKGFKKALGESFTTLARSQLDEIAEHIALIKDRVKLNEKLESYALTKEQREALSNLSFSAHINLSLQALKQILPFMRGDNGEQCLDYDESVEKAGLKALSKDTLKGQMLPPLNEFEPYLSNPVVARALAEYRKVLNALLKQYGSPHKIHIEYAREAKLSSTERQKYEKEQKDNYAANQAAHKKCQELGLEPSSTNLLKLKLWQEQGGLCLYSGAKITISYLQDPTALQVDHIYPYSRSFDDSYMNKCLVLTKANQEKGNRTPFEAFGTDSAKWGVITTLAQKLPHKKRRRILNTAFNDKEAGFKLRNLNDTSYIARLVADYTETYLEFLPLVESENTTLGKGQKGSKKHIAIVNGALTSTMRYYLGFASKDRDNHLHHALDAVIIGFMNDSVIKAFSDFKKTQETSKAAYYAHTLSKQEYKKQRAFIQLPSGENFRASVLEKVESVFVSKPPRKRVRGALHEATFYSPNDPKLLKNYGGTKGVERALALGKMRKVGAKIVSNGAMVRVDIFRHKSSGKFYGVPVYTMDFALGILPNKAVVVGKDKNGVIKDWLEMDSSYEFIFSLYKDDLLLVQKKEMAEPELCYFMSFNSSIAQISVAKHDNNFSTLTKNQKLLFSNATQEDVSGKSIGIQNLQVFEKWQVSVLGEVKRTQSYPRENISLASKAKK

SEQ ID NO: 459 - protein, 1023 aa, Helicobacter cinaedi
MKIYSFDIGVASIGWAFIENEVLQDCGIRIFTKAENPKNGASLALPRREARGVRKRLARRRGRLNTIKQLLCKEFGLQLEDYLSNDGELPKAYTASKANPLKSPYELRTLALSQKLDSKDLVRVILHIAKHRGYGNKHAKDSKDTESGKVKKAIEFNRKTLAEKGYRSVGEYLYREFFQQSRISQNNGATEFINVRNKAGNYEHCVAQDMLKEELESILNAQRQFGFSLKQDFESKLLTKIFEQRPLKSFADKVGNCCFIAGEKRAPKDSPSAIEFIALSRTINTLINLSKESGEIYNRAIILQIVESTLKKGEISYKELREIIRLDERLRFKDPRLDYSREIKEAEKVKFLEFKQLKGFKKALGESFTTLAISQLDEIAEHIALIKDRVKLNEKLESYALTKEQREALSNLSFSAHINLSLQALKQILPFMRGDNGEQCLDYDESVEKAGLKALSKDTLKGQMLPPLNEFEPYLSNPVVARALAEYRKVLNVLLKQYGSPHKIHIEYAREAKLSSTERQKYEKEQKDNYAANQAAHKKCQELGLEPSSTNLLKLKLWQEQGGLCLYSGAKITISYLQDPTALQVDHIYPYSRSFDDSYMNKCLVLTKANQEKGNRTPFEAFGTDSAKWGVITTLAQKLPHKKRRRILNTAFNDKEAGFKLRNLNDTSYIARLVADYTETYLEFLPLVESENTTLSKGQKGSKKHIAIVNGVLTSTMRYYLGFASKDRDNHLHHALDAVIIGFMNDSVIKAFSDFKKTQETSKAAYYAHTLSKQEYKKQRAFIQLPSGENFRVSVLEKVESVFVSKPPRKRVRGALHEATFYSPNDPKLLKNYGGTKGVERALALGKMRKVGAKIVSNGAMVRVDIFRHKSSGKFYGVPVYTMDFALGILPNKAVVVGKDQNGVIKDWLEMDSSYEFIFSLYKDDVILVQKKEMQRPELCYFVSFDTSGASIKVAKHDNNFSTLTENQKLLFSNATKEEVVGKSIGIQNLKVFEKWQVSVLGEVKRTQSYPRENISLASKAKK

SEQ ID NO: 460 - protein, 344 aa, Helicobacter pullorum
MKILGFDIGIASIGWAFVENGELKDCGVRIFTKAENPKTGDSLAMPRREARSVRRRLARRKGRLETLKRLLAKEWDLCYEDYIAADGELPKAFMGKNLTNPYVLRYEALQRLLSKEELVRVVLHIAKHRGYGNKNAKITKSEESKREQGKILSALATNASVIARYRTVGEYFYKEFCEVIKNPQGLNTNENCTQPKVRVLKPIRNKGGEYTNCILQEDLQRELRCIFEHQKGFGFSITQEFQDKILKIAFYQRSLKDFSHLVGKCTFYPDEPRAPKFSLSAIEFITKAKAINLLASIAKESGEVWDKEQWRERLDSVFSAVCERGINTIPSSSHFLNIFDILYL

SEQ ID NO: 461 - protein, 1688 aa, Ignavibacterium album
MEFKKVLGLDIGTNSIGCALLSLPKSIQDYGKGGRLEWLTSRVIPLDADYMKAFIDGKNGLPQVITPAGKRRQKRGSRRLKHRYKLRRSRLIRVFKTLNWLPEDFPLDNPKRIKETISTEGKFSFRISDYVPISDESYREFYREFGYPENEIEQVIEEINFRRKTKGKNKNPMIKLLPEDWVVYYLRKKALIKPTTKEELIRIIYLFNQRRGFKSSRKDLTETAILDYDEFAKRLAEKEKYSAENYETKFVSITKVKEVVELKTDGRKGKKRFKVILEDSRIEPYEIERKEKPDWEGKEYTFLVTQKLEKGKFKQNKPDLPKEEDWALCTTALDNRMGSKHPGEFFFDELLKAFKEKRGYKIRQYPVNRWRYKKELEFIWTKQCQLNPELNNLNINKEILRKLATVLYPSQSKFFGPKIKEFENSDVLHIISEDIIYYQRDLKSQKSLISECRYEKRKGIDGEIYGLKCIPKSSPLYQEFRIWQDIHNIKVIRKESEVNGKKKINIDETQLYINENIKEKLFELFNSKDSLSEKDILELISLNIINSGIKISKKEEETTHRINLFANRKELKGNETKSRYRKVFKKLGFDGEYILNHPSKLNRLWHSDYSNDYADKEKTEKSILSSLGWKNRNGKWEKSKNYDVFNLPLEVAKAIANLPPLKKEYGSYSALAIRKMLVVMRDGKYWQHPDQIAKDQENTSLMLFDKNLIQLTNNQRKVLNKYLLTLAEVQKRSTLIKQKLNEIEHNPYKLELVSDQDLEKQVLKSFLEKKNESDYLKGLKTYQAGYLIYGKHSEKDVPIVNSPDELGEYIRKKLPNNSLRNPIVEQVIRETIFIVRDVWKSFGIIDEIHIELGRELKNNSEERKKTSESQEKNFQEKERARKLLKELLNSSNFEHYDENGNKIFSSFTVNPNPDSPLDIEKFRIWKNQSGLTDEELNKKLKDEKIPTEIEVKKYILWLTQKCRSPYTGKIIPLSKLFDSNVYEIEHIIPRSKMKNDSTNNLVICELGVNKAKGDRLAANFISESNGKCKFGEVEYTLLKYGDYLQYCKDTFKYQKAKYKNLLATEPPEDFIERQINDTRYIGRKLAELLTPVVKDSKNIIFTIGSITSELKITWGLNGVWKDILRPRFKRLESIINKKLIFQDEDDPNKYHFDLSINPQLDKEGLKRLDHRHHALDATIIAATTREHVRYLNSLNAADNDEEKREYFLSLCNHKIRDFKLPWENFTSEVKSKLLSCVVSYKESKPILSDPFNKYLKWEYKNGKWQKVFAIQIKNDRWKAVRRSMFKEPIGTVWIKKIKEVSLKEAIKIQAIWEEVKNDPVRKKKEKYIYDDYAQKVIAKIVQELGLSSSMRKQDDEKLNKFINEAKVSAGVNKNLNTTNKTIYNLEGRFYEKIKVAEYVLYKAKRMPLNKKEYIEKLSLQKMFNDLPNFILEKSILDNYPEILKELESDNKYIIEPHKKNNPVNRLLLEHILEYHNNPKEAFSTEGLEKLNKKAINKIGKPIKYITRLDGDINEEEIFRGAVFETDKGSNVYFVMYENNQTKDREFLKPNPSISVLKAIEHKNKIDFFAPNRLGFSRIILSPGDLVYVPTNDQYVLIKDNSSNETIINWDDNEFISNRIYQVKKFTGNSCYFLKNDIASLILSYSASNGVGEFGSQNISEYSVDDPPIRIKDVCIKIRVDRLGNVRPL

SEQ ID NO: 462 - protein, 1354 aa, Indibacter alkaliphilus
MKKILGLDLGTTSIGWAFIKEPEKDVVGSEIVDMGVRIVPLSSDEENDFAKGNTISINADRTLKRGARRNLQRFKQRRNALLETFKEKNLIPSNFQYAEDGPSSTFSTLKLRDKAAKEKIELDDFVKVLLQINKKRGYKSSRKAMSEEDEGTAIDSMGIAKELYENDLTPGQWVYEALKNGRKNVPDFYRSDLQEEFKKIVNYQSEFYPDILNTSFVEDWMGKASTPTKQYFNKRGVQLAENKGKREERRLQEYKWRAEAVNFKIDLSEIALILSQINSQISNSSGYLGAISDRSKELYFKNLTVGQYLYQQVKKNPHTRLKGQVFYRQDYLDEFEKIWSVQSSFYPQLNDELKQEVRDVTIFFQRRLKSQKHLISNCEFEEHHKVVPKSHPIFQEFRIWQNLNNLTLIKKDNLNEKCELALEDKTALANELAFKKELSVKDALKVLGLKPSDWEFNFTKIEGNRTNHAFFEAFAKIIELEDGEPIDLGNLKADDILDQFSEAFLRIGIDTELLQVNSDIEGAEYEKQSYIQFWHLLYSSEDDQKLKQNLIRKFGFKPEHAKILASISLQDDHASLSSRAIKKILPHLQSGLIYDKACTYAGYNHSSSFTKDENEKRELRAELELLKKNSLRNPVVEKILNQMINVVNAILKDPNLGRPDEIRVEMARELKANAEQRKNMTSNIASATRDHEKYREILKKEFGLKRVTKNDLLRYKLWLETDGISLYTGKPIEASKLFSKEYDIEHIIPKARLFDDSFSNKTICERQLNIDKANVTAFSFLQNKLSADEFEQYQSRVKSLYGKLSKAKIQKLLMANDKIPEDFIARQLQETRYISKKAKEILFEITMRVSVTTGTITDKLREDWGLVEIMKELNWEKYDKLGLTYTIEGKHGERLNKIKDWNKRNDHRHHAMDALTVALTKPAYIQYLNNLNAKAIGNKKGTEIFAIEQKYLKRENGKLCFIPPIENIRAEAKKHLSKILVSYKAKNKVVTINKNKTKKKAGFNEQTALTPRGQLHKETVYGKSFHYSTKFEKIGASFDAQKINTVAKKEEREALLKRLAENGNDPKKAFTGKNSLNKMPIYLDLGKNIKLSEKVKTVVLEQNYTIRKNIDPDLKVDKVIDVGIKRILESRLEEFGGNAKLAFSNLEENPIWLNKEKGIPIKRVKISGVSNVESLHVKKDHFGEKILDEEGNEIPVDFVSTGNNHHVAIYEDEDGNLQDEVVNFYEAVIRRNQGESIIKYRHEEGWNFLYSIKQNEFFVFPSQDFNPNDFDLLDPKNYDLISPNLYRAQKFSKVMYGNSAVRDYVFRHHLETVLNDVKELKDVAYKQLKSLQYLNGIKKVRLNHLGQIIQVGEY

SEQ ID NO: 463 - protein, 1397 aa, Joostella marina
MKKVLGLDLGTNSIGWALVNEATKEEKKEGKSSEIIKLGVRVNPLTVDEKTNFEKGRPLSTNADRTLKRSARRNLQRYKLRRRNLIEILIKNGFITKDTPLTETGKDTTHQTLKLRAKSAKEKVDLKDFAKILLTINKKRGYKSSRKVNSDEDGLAIDGMAVAKHLYEQNLTPGQYVLNLLQKNKKYVPDFYRSDLQEEFKNIWNNQKTYYFDILTDTLFEELKDKNKSQTWAICKKPFDIAGIKQIGKASDKRLERYKWRTEGLTQKLNLEYLAIALQEINNDINKSSGYLGAISDRSKELFFNKETVGENLYRQLVKTPHTSLRNQVFYRQDYLDEFETIWETQAKFYPQLTHTLKEEIRDVIIFYQRKLKSQKSLISFCQFESWEQTYIEKETGKSKTRTVGRKVIPKSSPLFQEFKIWQNLNSLEFRNSDEGEIIEFIKLDEDIRQTVFEELNLRGNLKPNDVLKILGNYISLGKVSQWKCNFEEIEGNRTNAALYNVYQIIAENEGYGFDWAKKTASEINKELKNIFPQLGIDASILDFDFTQANFDKQTSYQLWHLLYSAEEDFKISEEDKVLYGNSSVSLKKKLHQKYGFKPEYTKLLTNISLQPDYGNLSAKAICNILPYLKENNVYSEACDLTGYNHSNFLTAEEQAKRPLKPILELLKKNSLRNPVVEKILNQMVNVVNQVIETYGKPDEIRIELTRELKKSAKERANMTKSIADATRRNDDYRKTIIKEFGIPNPTKSDVVRYRLWQELASRGYKDIFTDTEIKPQELFSNKIDIEHIIPKALLFDDSFSNKTLAFKKDNLKKANRTAYDFIANDYAPNLENYIERVESLHKDRKITRAKRNKLLMLQSKLPDGFIERDLRNSQYITKEAKKMLYEVCRTVVSTSGSITDKLREDWDLINVMKELNFPKYKALGLTEKIERYDIGAEKMKEVEIIEDWNKRNDHRHHAIDALTVAFSTHSHIQYLNHLNARRDEGHKKHAAIIAIESTITEKEGNKKRRFIAPLPNFRLQAKEHIESILVSFKNKNKVVTNNINKTKRIKKDKFNTKVQLTPRGQLHKETIYGKIKQPLEKHIKLNKSFTLEQAKLIIDKRQREKVLNHLEKYAHNSDIAFNSKTLKKNPLLISDEPLKEVLCFEEVFTIRKDISYDNFKNEKQLDKVIDEKVKQALKERINQYNGDFREAFSDIERNPIWLNKAKGICVKRATIKGVSNAEPLHTAKNHLGEEVLTENKEQIPVDYVSTGNNHHVAIYEDEDGNLQEKVVSFYEAVIRVNEGLPIIDKEYNKSLGWTFKFTMKQNEMFVFPSEDFNPTEIDLLDQKNASLISPNLFRVQKFTIKDYFFRHHLETTVENNNTLKNTTWRREGLSGIYGIIKIRLNHLGEIVQVGEY

SEQ ID NO: 464 - protein, 1060 aa, Kingella kingae
MAAKSLNYILGLDLGIASCGWAVVEMDEQENPLRLIDVGVRTFEEAENPKDGSSLAETRRLARAQRRLISRRANRMNKLCRLLKQENVLQANDYDEKGLIIGLPNQAWELRAQGLDRKLEPKEWAAVLIHLVKHRGYLSQRKNESQTADKELGALLSGMNHNHQLLQSQSNQYRTPAELAIKQFATQDGHIRNQRGAYTHTFNRLDLQNELNQLFDAQTRLGNPHVSGSLKTAINDLLMNQKAALSGDAILEMLGRCTFEPSEYKAAKNTYSAERFVWLGKLTNLRIQDNGLESALSREQRELLLNEPYNKTKLTYQQVRKLLRLPETAFFKGLRYGKDNAESATFMEMKSYHAIRKSLENKSLKSEWEKLKTQPKLLDLIGTAFSIYKTDDEIAGCLKNQLPENVIIALQGQLNFSNFMELSLKALEKLLPLMEQGLRYDEACTQIYGNRHEKIADKTEKFLPNIPADKLRNPVVLRTLTQARKVINAIIRRYGSPARVHIETGREVGKSFSDRDKLKKQQEENQEQRRRAIDEWKQFFPNAAHEPKAVDILKLRLYQLQQGKCLYSGLPIDVRRLPEKGYVEIDHALPFSRTWDDSFNNKILVLASENQNKGNQTPYEYLRGADNSESWRLFVENVQNCQFSPNKKQKIMAKQLDEKGFLERNLNDTRYVSRFLCQFISEHLHLTGKGKKRVFASNGQITALLRGRWGLSKNREENDRHHAVDAVVVACSTVAMQQKITQFVRYQKGNVFTGERIDKETGEVISIHFPTPWEHFREEVMIRVFDDNPLRTLPEKLPNRPEALHEYVMPLFVSRMPTRKMTGQGHKETIKSAKRLDEKISVLRVPLTQLKLNDLENMVNREREPALYEALKARLEQFKNDPAKAFAEPFFKQGGQQVKAVRVEIVQKSGMLLRKINGVADNGSMVRVDVFEKSGKFYLVPIYAWQVAEGILPNYAVVAHKDESDWILMDESYHFKFALYKNDLLEVQTKKGGIMGYFASLDRATGAITIREHDRDKKKCKDGEHRSIGVKMASSFKKLQVDELGKNIHETRSRKRPNIG

SEQ ID NO: 465 - protein, 1314 aa, Lactobacillus animalis
MLKKDYSIGLDIGTNSVGHAVVTDDYKVPTKKMKVFGDTSKKTIKKNMLGVLLFNEGQTAADTRLKRGTRRRYTRRKNRLRYLQEIFAPELAKVDPNFLYRLEESSLVAEDKKYDVYPIFGKREEELLYHDTYKTIYHLRSALANNDQPADLRLVYLALAHIIKYRGNFLLEGEIDLRTTDINKVFAEFSETLNENSDENLGKLDVADIFKNNTFSKTKKSEELLKLSGAKKNQLAHQLFKMMVGNMGSFKKVLGTDEEHKLSFGKDTYEDDLNDLLAEAGDQYLDIFVAAKKVYDAAILASILDVKDTQTKTVFSQAMIERYEEHQKDLIELKRVFKKYLPEKCHDFFSEPKISGYAGYIDGKVSEEDFYKYTKKTLKGIPETEEILQKIDANNYLRKQRTFDNGAIPHQVHLKELVAIVENQGKYYPFLRENKDKFEKILNFRIPYYVGPLARGNSKFAWLTRAGEGKITPYNFDEMIDKETSAEDFIKHMTINDLYLPTEPVLPKHSLLYERYTIFNELAGVRYVTENGEAKYFDAQTKRSIFELFKLDRKVSEKMVIKHLKVVMPAIRIQALKGLDNGKFNASYGTYKDLVDMGVAPELLNDEVNSEKWEDIIKTLTIFEGRKLIKRRLENYRDFLGEDILRKLSRKKYTGWGRLSAKLLDGIYDKKTHKTILDCLMTEDYSQNFMQLINDDNYSFKETIKNAQVIEKEETLAKTVQELPGSPAIKKGILQSLEIVDEIIKVMGYKPKSIVVEMARETQKTHGTRKREDRVQQIVENLKDANELPEKLPSNAELSDERKYLYCLQNGRDMYTGAPLDYDHLQFYDVDHIIPQSFLKDDSIENKVLTIKKENVRKTNGLPSEAVIQKMGSFWKKLLDAGAMTNKKYDNLRRNLHGGLNEKLKERFIERQLVETRQITKYVAQLLDQRLNYDGNGVELDEKIAIVTLKAQLASQFRSEFKLRKVRALNNLHHAHDAYLNAIVANLIMAKYPELEPEFVYGKYRKAKFKGLGKATAKNTLYANVLYFLKENEVYPFWDKARDLPTIKRYLYRAQVNKVRKAERQIGGFSDEMLVPKSDSGKLLPRKEGLDPVKYGGYAKAVESYAVLITADEVKKGKTKKVKTLVNIPIIDSKKYEADPTAYLASRGYTNVTNSFILPKYSLLEDPEGRRRYLASFKEFQKANELILPQHLVELLYWVNAKDGEQKLEDHKAEFKELFDKIMEFADKYVVAPKNSEKIRRLYEENQDATPMELGKNFVELLRYTADGAASDFKFFGENIPRKRYNSAGSLLNGTLIYQSKTGLYETRIDLGKL

SEQ ID NO: 466 - protein, 1371 aa, Lactobacillus buchneri
MKVNNYHIGLDIGTSSIGWVAIGKDGKPLRVKGKTAIGARLFQEGNPAADRRMFRTTRRRLSRRKWRLKLLEEIFDPYITPVDSTFFARLKQSNLSPKDSRKEFKGSMLFPDLTDMQYHKNYPTIYHLRHALMTQDKKFDIRMVYLAIHHIVKYRGNFLNSTPVDSFKASKVDFVDQFKKLNELYAAINPEESFKINLANSEDIGHQFLDPSIRKFDKKKQIPKIVPVMMNDKVTDRLNGKIASEIIHAILGYKAKLDVVLQCTPVDSKPWALKFDDEDIDAKLEKILPEMDENQQSIVAILQNLYSQVTLNQIVPNGMSLSESMIEKYNDHHDHLKLYKKLIDQLADPKKKAVLKKAYSQYVGDDGKVIEQAEFWSSVKKNLDDSELSKQIMDLIDAEKFMPKQRTSQNGVIPHQLHQRELDEIIEHQSKYYPWLVEINPNKHDLHLAKYKIEQLVAFRVPYYVGPMITPKDQAESAETVFSWMERKGTETGQITPWNFDEKVDRKASANRFIKRMTTKDTYLIGEDVLPDESLLYEKFKVLNELNMVRVNGKLLKVADKQAIFQDLFENYKHVSVKKLQNYIKAKTGLPSDPEISGLSDPEHFNNSLGTYNDFKKLFGSKVDEPDLQDDFEKIVEWSTVFEDKKILREKLNEITWLSDQQKDVLESSRYQGWGRLSKKLLTGIVNDQGERIIDKLWNTNKNFMQIQSDDDFAKRIHEANADQMQAVDVEDVLADAYTSPQNKKAIRQVVKVVDDIQKAMGGVAPKYISIEFTRSEDRNPRRTISRQRQLENTLKDTAKSLAKSINPELLSELDNAAKSKKGLTDRLYLYFTQLGKDIYTGEPINIDELNKYDIDHILPQAFIKDNSLDNRVLVLTAVNNGKSDNVPLRMFGAKMGHFWKQLAEAGLISKRKLKNLQTDPDTISKYAMHGFIRRQLVETSQVIKLVANILGDKYRNDDTKIIEITARMNHQMRDEFGFIKNREINDYHHAFDAYLTAFLGRYLYHRYIKLRPYFVYGDFKKFREDKVTMRNFNFLHDLTDDTQEKIADAETGEVIWDRENSIQQLKDVYHYKFMLISHEVYTLRGAMFNQTVYPASDAGKRKLIPVKADRPVNVYGGYSGSADAYMAIVRIHNKKGDKYRVVGVPMRALDRLDAAKNVSDADFDRALKDVLAPQLTKTKKSRKTGEITQVIEDFEIVLGKVMYRQLMIDGDKKFMLGSSTYQYNAKQLVLSDQSVKTLASKGRLDPLQESMDYNNVYTEILDKVNQYFSLYDMNKFRHKLNLGFSKFISFPNHNVLDGNTKVSSGKREILQEILNGLHANPTFGNLKDVGITTPFGQLQQPNGILLSDETKIRYQSPTGLFERTVSLKDL

SEQ ID NO: 467 - protein, 315 aa, Lactobacillus casei
MFKDYLKQLEDDGTAKAIRQLYDRYIDGDDAKPFVREDFVKALTKEVTAHPNAKSPELLERLAQPDFMLKQRNKANGAIPVQMQQRELDQIIKNQSVYYDWLAAPNPVEKHRKSMPYQLDELLNFRIPYYVGPLVTAKEQKAARGGVFAWMVRKDPDGNITPYNFDEKVDREASANTFIQRMKTTDTYLIGEDVLPKQSLLYQSYEVLNELNNVRVNDNKLSFDQKQQVLGELFERHNTVTIKQFVDNLLAHGDYDRIPEVRGLADEKRFLSSLSTYNQLKGILHEAIDDSDKQTDMVDCKINPNAVRTKKISFL

SEQ ID NO: 468 - protein, 236 aa, Lactobacillus casei
MFKDYLKQLEDDGTAKAIRQLYDRYIDGDDAKPFVREDFVKALTKEVTAHPNAKSPELLERLAQPDFMLKQRNKANGAIPVQMQQRELDQIIKNQSVYYDWLAAPNPVEKHRKSMPYQLDELLNFRIPYYVGPLVTAKEQKAARGGVFAWMVRKDPDGNITPYNFDEKVDREASANTFIQRMKTTDTYLIGEDVLPKQSLLYQSYEVLNELNNVRVNDNKLSSSIFKSSATMITNS

SEQ ID NO: 469 - protein, 1389 aa, Lactobacillus casei
MIIRTYELKTITTIAILKMFQLLTGGLSMTKLGKPYGIGVDIGSNSIGFAAVDENSHLIRLKGKTVIGARLFEEGKAAADRRASRTTRRRLSRNRWRLSFLRDFFESHITPTGPNFFMRQKYSEISPKDKARYKYEKRLFNDRTDAEFYQQYPTMYHLRNRLLTDPSKADVREIYFAIHHILKSRGHFLTSGYAKDFNTNKVALNEIFPALQDAYAQVYPDLDITFDENKVNEFKTVLLNEKATPSDTQRALVNLLLAEDGDKDILKQQKQVLTEFAKAVVGLKTKLNVALGTEVDSSEATVWNFSLGQLDDKWAGIESAMTDEGTEILDQIRDLYRARLLNGIVPAGKTLSQAKVDDYAQHHEDLELFKDYLKQLEDDGTAKAIRQLYDRYIDGDDAKPFVREDFVKALTKEVTAHPNAKSPELLERLAQPDFMLKQRNKANGAIPVQMQQRELDQIIKNQSVYYDWLAAPNPVEKHRKSMPYQLDELLNFRIPYYVGPLVTAKEQKAAQGGVFAWMVRKDPDGNITPYNFDEKVDREASANTFIQRMKTTDTYLIGEDVLPKQSLLYQRYEVLNELNNVRVNNEKLSIEQKQQVIRELFERHNSVTIKQFAENLRAHGDYAHIPEIRGLADEKRFLSSLSTYRQLKSLLPDAIDDPAKQADIENIIAWSTVFEDAAIFKTKLKEINWLDSQTITKLSNIRYRGWGQFSHKFLNGLTLGNGHTIIQELFLSNNNLMQILTDETLQKKMTELNADKLKAANINDAIDDAYTSPSNKKALRQVLRVIEDIKRAADGQDPSWLYVETADGGGTPGKRTRARQHQLQEIYANAAHELIDSAVRGELEDKIADKADFNDRLVLYFMQGGRDIYTGTPLNIDQLSSYDIDHILPQSLIKDNSLDNRVLVHAIINREKNATFASTIYAQKMNATWRQWHEAGLISGRKLRNLQMRPDQIDKYASGFVARQLVETRQIIKLTEQIVAAQYPETKIIAVKAGLSHQLREELEFPKNRDVNHYHHAFDAFLAARIGTYLLKRFPNLQAFFTYGKFKKADVKKLRGFNFIRDITHAEDKIVVKDTGEVIWDKKRDVDELDRIYNFKRMLITHEVHFEKADLFKQTVYGAKDSKEAGGKKQLISKKKGYPVDIYGGYTQETGSYLSVVRLTKKAMYAVVKVSTRDAAKLAVAKSISEQKENETLNDIIDEKLSKISKNGKITHELFEVVLPRVGQKTLFKNSKYNLFLVNSDTYMHNYQELWMPREYQKMWKDISLSKYGDAQTEDQLDQIFGFIVSQVNSYFNLYDINQFRKKLNDAADKFATLPMRDTDDMQGKIATIGQLLIGLQANAARSDLRNLDIKTPLGLLQIPNGISLDSDTSVVYQSPTGLLEREVHLSDL

SEQ ID NO: 470 - protein, 412 aa, Lactobacillus casei
MIKDNSLDNRVLVHPLVNREKDTIFASTRFAKQTNGMWRQWHAAGLISSRKLRNLQMRPDEIDKYASGFVARQLVETRQIIKLTEQIVADQYPDTKIIAVKAGLSSQLRKELDFPKNREVNHYHHAFDAFLAARIGTYLLKRYPNLEPFFTYGKFKKTEVKKLKSFNFIRDMTHAKDKIVAKETGEIVWDNASDINELDRIYNFKRMLITHEVRFETASLFKQTLYAAKNPKNRGGSRQLIPKKKGYLVDIYGGYTQETGSYLSVVRLTKKAMYAVVKVSTRDAAKLAVAKSISEQKENETLKKIIDGKLSKTSKKGKTTHQLFEIVLPRVGQKTLFKNSKYNQFLVNSDTYMHNYQELWMPREYQRMWKDILLSNHGDAQIEGQLDQIFKFIVSQVNSYFNLYDINQFRKK

SEQ ID NO: 471 - protein, 234 aa, Lactobacillus casei
MKVTKKTETIFKVVKIATSQVAALNKARSRSTAEELSVLTELLKPKFSKVGKNGKITDTPFEVVLPRVPREQLFYNAKYGFFMVNSDTMFHNFQEIWVSRSDQKILQQIRKAKIDYPNVDQDLDNLFHNLADQIVKYFDLYSIAGFKEKISQSQNTFNDLAVDDTDQSVGKITVINELLKGAQANGMTGSLKVLKISTPFGFTQDKSGVLTKDSSIIYQSPTGLFERSVRLTDL

SEQ ID NO: 472 - protein, 566 aa, Lactobacillus casei
MQILTDEVLKQKIAELNAHELKASGIYAAIDDAYTSPSNKKALRQVLSVIDDITNAAGQAPNWLYIETADGDGVPGKRTNSRQRKIQEIYVNAAQELITSSVRGELEDKIASRADFTDRLVLYFMQGGRDIYTGEPLNIDNLSSYDIDHILPQSLIKDNSLDNRVLVHPLVNREKDTIFASTRFAKQMNGMWRQWHAAGLISSRKLRNLQMRPDEIDKYASGFVARQLVETRQIIKLTEQIVADQYPDAKIIAVKAGLSSQLRKELDFPKNREVNHYHHAFDAFLAARIGTYLLKRYPNLEPFFTYGKFKKTEVKKLKSFNFIRDMTHAKDKIVAKETGEIVWDNASDINELDRIYNFKRMLITHEVRFETASLFKQTLYAAKNSKNRGGSRQLIPKKKGYLVDIYGGYTQETGSYLSVVRLTKKAMYAVVKVSTRDAAKLAVAKSISEQKENETLKKIIDGKLSKTSKKGKTTHQLFEIVLPRVGQKTLFKNSKYNQFLVNSDTYMHNYQELWMPREYQRMWKDILLSNHGDAQLEGQLDQIFKFIVSQVNSYFNLYDINQFRKK

SEQ ID NO: 473 - protein, 1363 aa, Lactobacillus casei
MTKLGKPYGIGVDIGSNSIGFAAVDENSHLIRLKGKTVIGARLFEEGKAAADRRASRTTRRRLSRNRWRLSFLRDFFESHITPTDPNFFMRQKYSEISPKDKARYKYEKRLFNDRTDAEFYQQYPTMYHLRNRLLTDPSKADVREIYFAIHHILKSRGHFLTSGYAKDFNTNKVALNEIFPALQDAYAQVYPDLDITFDENKVNEFKTVLLDEKATPSDTQRALVNLLLAEDGDKDILKQQKQVLTEFAKAVVGLKMKLNVALGTEVDSSEATAWNFSLGQLDDKWAGIESAMTDEGTEILDQIRDLYRARLLNGIVPAGKTLSQAKVDDYEQHHEDLELFKDYLKQLEDDGMAKVIRQLYDRYIDGDDAKPFVREDFVKALTKEVTAHPNAKSPELLERLVQPDFMLKQRNKANGAIPVQMQQRELDQIIKNQSVYYDWLAAPNPVEKHRQSMPYQLDELLNFRIPYYVGPLVTAKEQKAAQGGVFAWMVRKDPDGNITPYNFDEKVDREASANTFIQRMKTTDTYLIGEDVLPKQSLLYQSYEVLNELNNVRVNDNKLSFDQKQQVLGELFERHNTVTIKQFVDNLLAHGDYDRIPEVRGLADEKRFLSSLSTYNQLKGILHEAIDDSDKQTDIEKIIAWSTIFEDKAIFKTKLNEISWLTAGMINSLANIRYRGWGQFSHKLLNELTLSTGRTVFEELLISSHNLMQILTDEVLKQKIAELNAHELKASGIYAAIDDAYTSPSNKKALRQVLSVIDDITNAAGQAPNWLYIETADGDGVPGKRTNSRQRKIQEIYANAAQELITGSVRGELEDKIASRADFTDRLVLYFMQGGRDIYTGEPLNIDNLSSYDIDHILPQSLIKDNSLDNRVLVHPLVNREKDTIFASTRFAKQMNGMWRQWHAAGLISSRKLRNLQMRPDEIDKYASGFVARQLVETRQIIKLTEQIVADQYPDAKIIAVKAGLSSQLRKELDFPKNREVNHYHHAFDAFLAARIGTYLLKRYPNLEPFFTYGKFKKTEVKKLKSLKSFNFIRDMTHAKDKIVAKETGEIVWDNASDINELDRIYNFKRMLITHEVRFETASLFKQTLYAAKNSKNRGGSRQLIPKKKGYLVDIYGGYTQETGSYLSVVRLTKKAMYAVVKVSTRDAAKLAVAKSISEQKENETLKKIIDGKLSKTSKKGKTTHQLFEIVLPRVGQKTLFKNSKYNQFLVNSDTYMHNYQELWMPREYQRMWKDILLSNHGDAQLEGQLDQIFKFIVSQVNSYFNLYDINQFRKKIADATDKFAKLPTHDTDNARGKIATIGQLLIGLQANAMRSDLRNLDIKTPFGLLQIGTGITLDLDTSIIYQSPTGLFEREVPLTDL

SEQ ID NO: 474 - protein, 1360 aa, Lactobacillus casei
MTKLGKPYGIGVDIGSNSIGFAAVDENSHLIRLKGKTVIGARLFEEGKAAADRRASRTTRRRLSRNRWRLSFLRDFFESHITPTDPNFFMRQKYSEISPKDKARYKYEKRLFNDRTDAEFYQQYPTMYHLRTRLLTDPSKADVREIYFAIHHILKSRGHFLTPGYAKDFNTNKVALNEIFPALQDAYAQVYPDLDITFDENKVNEFKTVLLNEKATPSDTQRALVNLLLAEDGDKDILKQQKQVLTEFAKAVVGLKTKLNVALGTEVDSSEATVWNFSLGQLDDKWAGIESAMTDEGTEILDQIRDLYRARLLNGIVPAGKTLSQAKVDDYAQHHEDLELFKDYLKQLEDDGTAKAIRQLYDRYIDGDDAKPFVREDFVKALTKEVTAHPNAKSPELLERLAQPDFMLKQRNKANGAIPVQMQQRELDQIIKNQSVYYDWLAAPNPVEKHRKSMPYQLDELLNFRIPYYVGPLVTAKEQKAAQGGVFAWMVRKDPDGNITPYNFDEKVDREASANTFIQRMKTTDTYLIGEDVLPKQSLLYQSYEVLNELNNVRVNDNKLSFDQKQQVLGELFERHNTVTIKQFVDNLLAHGDYDRIPEVRGLADEKRFLSSLSTYNQLKGILHEAIDDADKQTDIENIIAWSTIFEDKAIFKTKLNEISWLNAGMINSLANIRYRGWGQFSHKLLNELTLSTGRTVFEELLISSRNLMQILTDEVLKQKIAELNAHELKASGIYAAIDDAYTSPSNKKALRQVLSVIDDITNAAGQAPNWLYIETADGDGVPGKRTNSRQRKIQEIYANAAQELITGSVRGELEDKIASRADFTDRLVLYFMQGGRDIYTGEPLNIDNLSSYDIDHILPQSLIKDNSLDNRVLVHPLVNREKDTIFASTRFAKQMNGMWRQWHAAGLISSRKLRNLQMRPDEIDKYASGFVARQLVETRQIIKLTEQIVADQYPDTKIIAVKAGLSSQLRKELDFPKNREVNHYHHAFDAFLAARIGTYLLKRYPNLEPFFTYGKFKKTEVKKLKSFNFIRDMTHAKDKIVAKETGEIVWDNASDINELDRIYNFKRMLITHEVRFETASLFKQTLYAAKNSKNRGGSRQLIPKKKGYLVDIYGGYTQETGSYLSVVRLTKKAMYAVVKVSTRDAAKLAVAKSISEQKENETLKKIIDGKLSKTSKKGKTTHQLFEIVLPRVGQKTLFKNSKYNQFLVNSDTYMHNYQELWMPREYQRMWKDILLSNHGDAQLEGQLDQIFKFIVSQVNSYFNLYDINQFRKKIADATDKFAKLPTHDTDNARGKIATIGQLLIGLQANAMRSDLRNLDIKTPFGLLQIGTGITLDLDTSIIYQSPTGLFEREVPLTDL

SEQ ID NO: 475 - protein, 700 aa, Lactobacillus casei
MTKLGKPYGIGVDIGSNSIGFAAVDENSHLIRLKGKTVIGARLFEEGKAAADRRASRTTRRRLSRNRWRLSFLRDFFESHITPTDPNFFMRQKYSEISPKDKARYKYEKRLFNDRTDAEFYQQYPTMYHLRTRLLTDPSKADVREIYFAIHHILKSRGHFLTSGYAKDFNTNKVALNEIFPALQDAYAQVYPDLDITFDENKVNEFKTVLLDEKATPSDTQRALVNLLLAEDGDKDILKQQKQVLTEFAKAVVGLKTKLNVALGTEVDSSEATAWNFSLGQLDDKWAGIESAMTDEGTEILDQIRDLYRARLLNGIVPAGKTLSQAKVDDYEQHHEDLELFKDYLKQLEDDGMAKAIRQLYDRYIDGDDAKPFVREDFVKALTKEVTAHPNAKSPELLERLVQPDFMLKQRNKANGAIPVQMQQRELDQIIKNQSVYYDWLAAPNPVEKHRQSMPYQLDELLNFRIPYYVGPLVTAKEQKAAQGGVFAWMVRKDPDGNITPYNFDEKVDREASANTFIQRMKTTDTYLIGEDVLPKQSLLYQSYEVLNELNNVRVNDNKLSFDQKQQVLGELFERHNTVTIKQFVDNLLAHGDYDRIPEVRGLADEKRFLSSLSTYNQLKGILHEAIDDSDKQTDIEKIIAWSTIFEDKAIFKTKLNEISWLNAGMINSLANIRYRGWGQFSHKLLNELTLSTGRTVFEA

SEQ ID NO: 476 - protein, 330 aa, Lactobacillus casei
MTKLGKPYGIGVDIGSNSIGFAAVDENSHLIRLKGKTVIGARLFEEGKAAADRRASRTTRRRLSRNRWRLSFLRDFFESHITPTDPNFFMRQKYSEISPKDKNRYKYEKRLFNDRTDAEFYQQYPTMYHLRNRLLTDPSKADVREIYFAIHHILKSRGHFLTPGDAKDFNTNKVALNEIFPALQDAYAQVYPDLDITFDENKMNEFKTVLLNEKATPSDTQRALVNLLLAEDGDKDILKQQKQVLTEFAKAVVGLKTKLNVALGTEVDSSEATAWNFSLGQLDDKWAGIESAMTDEGTEILDQIRDLYRARLLNGIVPAGKTLSQAKVDD

SEQ ID NO: 477 - protein, 330 aa, Lactobacillus casei
MTKLGKPYGIGVDIGSNSIGFAAVDENSHLIRLKGKTVIGARLFEEGKAAADRRASRTTRRRLSRNRWRLSFLRDFFESHITPTDPNFFMRQKYSEISPKDKNRYKYEKRLFNDRTDAEFYQQYPTMYHLRNRLLTDPSKADVREIYFAIHHILKSRGHFLTPGDAKDFNTNKVALNEIFPALQDAYAQVYPDLDITFDENKMNEFKTVLLNEKATPSDTQRALVNLLLAEDGDKDILKQQKQVLTEFAKAVVGLKTKLNVALGTEVDSSEATAWNFSLGQLDDKWAGIESAMTDEGTEILDQIRDLYRARLLNGIVPAGKTLSHAKVDD

SEQ ID NO: 478 - protein, 1361 aa, Lactobacillus casei
MTKLGKPYGIGVDIGSNSIGFAAVDENSHLIRLKGKTVIGARLFEEGKAAADRRASRTTRRRLSRNRWRLSFLRDFFESHITPTGPNFFMRQKYSEISPKDKARYKYEKRLFNDRTDAEFYQQYPTMYHLRNRLLTDPSKADVREIYFAIHHILKSRGHFLTSGYAKDFNTNKVALNEIFPALQDAYAQVYPDLDITFDENKVNEFKTVLLNEKATPSDTQRALVNLLLAEDGDKDILKQQKQVLTEFAKAVVGLKTKLNVALGTEVDSSEATVWNFSLGQLDDKWAGIESAMTDEGTEILDQIRDLYRARLLNGIVPAGNTLSQAKVDDYAQHHEDLELFKDYLKQLEDDGTAKAIRQLYDRYIDGDDAKPFVREDFVKALTKEVTAHPNAKSPELLERLAQPDFMLKQRNKANGAIPVQMQQRELDQIIKNQSVYYDWLAAPNPVEKHRKSMPYQLDELLNFRIPYYVGPLVTAKEQKAAQGGVFAWMVRKDPDGNITPYNFDEKVDREASANTFIQRMKTTDTYLIGEDVLPKQSLLYQRYEVLNELNNVRVNNEKLSIEQKQQVIRELFERHNSVTIKQFAENLRAHGDYAHIPEIRGLADEKRFLSSLSTYRQLKSLLPDAIDDPAKQADIENIIAWSTVFEDAAIFKTKLKEINWLDSQTITKLSNIRYRGWGQFSHKFLNGLTLGNGHTIIQELFLSNNNLMQILTDETLQKKMTELNADKLKAANINDAIDDAYTSPSNKKALRQVLRVIEDIKRAADGQDPSWLYVETADGGGTPGKRTRARQHQLQEIYANAAHELIDSAVRGELEDKIADKADFNDRLVLYFMQGGRDIYTGTPLNIDQLSSYDIDHILPQSLIKDNSLDNRVLVHAIINREKNATFASTIYAQKMNATWRQWHEAGLISGRKLRNLQMRPDQIDKYASGFVARQLVETRQIIKLTEQIVAAQYPETKIIAVKAGLSHQLREELEFPKNRDVNHYHHAFDAFLAARIGTYLLKRFPNLQAFFTYGKFKKADVKKLRGFNFIRDITHAEDKIVVKDTGEVIWDKKRDVDELDRIYNFKRMLITHEVHFEKADLFKQTVYGAKDSKEAGGKKQLISKKKGYPVDIYGGYTQETGSYLSVVRLTKKAMYAVVKVSTRDAAKLAVAKSISEQKENETLNDIIDEKLSKISKNGKITHELFEVVLPRVGQKTLFKNSKYNLFLVNSDTYMHNYQELWMPREYQKMWKDISLSKYGDAQTEDQLDQIFGFIVSQVNSYFNLYDINQFRKKLNDAADKFATLPMRDTDDMQGKIATIGQLLIGLQANAARSDLRNLDIKTPLGLLQIPNGISLDSDTSVVYQSPTGLLEREVHLSDL

SEQ ID NO: 479 - protein, 1128 aa, Lactobacillus casei
MTKLGKPYGIGVDIGSNSIGFAAVDENSHLIRLKGKTVIGARLFEEGKAAAKRRAGRTTRRRLSRNRWRLSFLRDFFESHITPTDPNFFMRQKYSEISPKDKARYKYEKRLFNDRTDAEFYQQYSTMYHLRNRLMTDPSRADVREIYFAIHHILKSRGHFLTPGDAKDFNTNDVALDEIFPALQDAYAQVYPDLGITFDEDKANEFKTILLNEIATSIDTQRALVKLLLAEEDDKDILKQQKQVLTEFAKAVVGLKTKLNLALGTEVDSSEATAWNFSLGQLDDKWAGIESAMTDEGTEILDQIRDLYRARLLNGIVPTGKTLSQAKVDDYTQHHEDLQLFKAYLKQLEDDGTAKAIRQLYDRYIDGDDAAPFLRENFVKALTKDVTAHPNTKSPELLERLAQPDFMLKQRNKANGAIPVQMQQRELDQIIKNQAVYYDWLAAPNPVEKHRKSMPYQLDELLNFRIPYYVGPLVTAKEQKAAQGGVFAWMVRKDPEGNITPYNFDEKVDREASANTFIQRMKTTDTYLIGEDVLPKQSLLYQRYEVLNELNNVRVNNEKLSIEQKQQVIRELFERHNSVTIKQFAENLRAHGDYAHIPEIRGLADEKRFLSSLSTYRQLKSLLPEAIDDPAKQADIENIIAWSTVFEDAAIFKTKLKEISWLGSEAITKLSNIRYRGWGQFSRKFLNGLTLGNGHTIIQELLLSTNNLMQILTDETLQKKMTELNADKLKTANINDAIDNAYTSPSNKKALRQVLRVVDDIKRAADGQDPSWLYVETADGGGTPGKRTRARQHQLQEIYANAAHELIDTAVRGELEDKISDKADFNDRLVLYFMQGGRDIYTGAPLNIDQLSSYDIDHILPQSLIKDNSLDNRVLVHAIINREKNATFASTIYAQKMNATWRQWHEAGLISGRKLRNLQMRPDQIDKYASGFVARQLVETRQIIKLTEQIVAAQYPDTKIIAVKAGLSHQLREELEFPKNRDVNHYHHAFDAFLAARIGTYLLKRFPNLQAFFTYGKFTKADVKKLRGFNFIRDITHAEDKIVAKDTGEVVWDKQRDVDELDRIYNFKRMLITHEVRFETADLFKQTVYGARDSKEAGGSKQLIPKKKDIQLIFMGAISERTRPILPL

SEQ ID NO: 480 - protein, 1366 aa, Lactobacillus casei
MTKLGKPYGIGVDIGSNSIGFAAVDENSHLIRLKGKTVIGARLFEEGKAAAYRRASRTTRRRLSRNRWRLSFLRDFFESHITPTDPNFFMRQKYSEISPKDKARYKYEKRLFNDRTDAEFYQQYPTMYHLRTRLLTDPSKADVREIYFAIHHILKSRGHFLTPGYAKDFNTNKVALNEIFPALQDAYAQVYPDLDITFDENKVNEFKTVLLNEKATPSDTQRALVNLLLAKEGDRDILKQQKQVLTEFAKAVVGLKTKLNVALGTEVDSSEATAWNFSLGQLDDKWAGIESAMTDEGTEILDQIRDLYRARLLNGIVPAGKTLSQAKVDDYAQHHEDLELFKDYLKQLEDDGTAKAIRQLYDRYIDGDDAKPFVREDFVKALTKEVTAHPNAKSPELLERLAQPDFMLKQRNKANGAIPVQMQQRELDQIIKNQAVYYDWLAAPNPVEKHRQSMTYQLDELLNFRIPYYVGPLVTAKEQKAAQGGVFAWMVRKDPDGNITPYNFDEKVDREASANTFIQRMKTTDTYLIGEDVLPKQSLLYQSYEVLNELNNVRVNDNKLSFDQKQQVLGELFERHNTVTIKQFVDNLLAHGDYDRIPEVRGLADEKRFLSSLSTYNQLKGILHEAIDDADKQTDIENIIAWSTIFEDKAIFKTKLNEISWLNAGMINSLANIRYRGWGQFSHKLLNELTLSTGRTVFEELLISSRNLMQILTDEVLKQKIAELNAHELKASGIYAAIDDAYTSPSNKKALRQVLSVIDDITNAAGQAPNWLYIETADGDGVPGKRTNSRQRKIQEIYANAAQELITGSVRGEFEDKIASRADFTDRLVLYFMQGGRDIYTGEPLNIDNLSSYDIDHILPQSLIKDNSLDNRVLVHPLVNREKDTIFASTRFAKQMNGMWRQWHAAGLISSRKLRNLQMRPDEIDKYASGFVARQLVETRQIIKLTEQIVADQYPDTKIIAVKAGLSSQLRKELDFPKNREVNHYHHAFDAFLAARIGTYLLKRYPNLEPFFTYGKFKKTEVKKLKSLKSLKSFNFIRDMTHAKDKIVAKETGEIVWDNASDINELDRIYNFKRMLITHEVRFETASLFKQTLYAAKNSKNRGGSRQLIPKKKGYLVDIYGGYTQETGSYLSVVRLTKKAMYAVVKVSTRDAAKLAVAKSISEQKENETLKKIIDGKLSKTSKKGKTTHQLFEIVLPRVGQKTLFKNSKYNQFLVNSDTYMHNYQELWMPREYQRMWKDILLSNHGDAQIEGQLDQIFKFIVSQVNSYFNLYDINQFRKKIADATDKFAKLPTHDTDNARGKIATIGQLLIGLQANAMRSDLRNLDIKTPFGLLQIGTGITLDLDTSIIYQSPTGLFEREVPLTDL

SEQ ID NO: 481 - protein, 1354 aa, Lactobacillus coryniformis
MTLHYNVGLDIGTNSVGYTIVDDNGKILQVKGKNGYGVRVFKEGATAAERRIFRTTHRRLKRRKWRLRLLQDFFEPYILPQDDGFFIRRKESNLVLNDRDEDTASLFNDRSDRDFYQAYPTIYHLRQALMTEKRQFDVREIYLAMHHIIKYRGHFLLNGTVNNFTNNKIDLHSDFEELNALLLNVIPELKFQIDLDHSTMFQTTLLNTTISRSGRQRDLVKSFYNGSDDKQLAKQQKSVATELLKAILGLKAKFHKLFNLDLLETTEWEFSFDAEDIDDKLAKLEPLMTENQQQVMDILQRIFAAITLNGIVPEGKTLSASKVDSYQKHKQDLKLLKAIAQHSDKKTATVLQTAYNEYINGIASKPLKQEDFYKRLTNAVKKSSDPQVADMLALIDQEKFLPKQRTKENGAIPHQLHQLELERIIDNQKDYYPWLAELNPNQARQKVAKYKLSELVAFRVPYYVGPLIEPEVQQATSNAHFAWMARKEAGPITPWNFDQKVDRNVSAERFIKRMTTKDTYLLAEDVLPLHSLLYQRFIVLNELNNVRVNGQKLTKKQKQAVYQDLFKRQPHVTKKQFKSYLVQTGEFAESSKIEGLANETSFNSGLTTENELRKIFGAQLDEARYQVDFEQIIEWATLFEDAKILRTKLAEITWLTTEQIEKLAGIRYRGWGRFSRKLLAGLRDQNGQQIIDLLWDTPNNFMVIVSQAAFSEAITKENEKLIDRRGAQDVITDLYTSPQNKKALRQVLAIVADVQKAMGGVPPQRIFIEFAREDEKNPRRSVERSRQLEKLYQTISNEFLINSEVRQELKEAVDQKVNFKDRLFLYFLQGGVDLYSGKRINIDQLSHYDIDHILPQSFIKDDSLDNRVLVSQKLNRSKSDSVPLSEFANYKFGPAMQAKWLQLKEAGLLSKRKYDNLTLDPTKLSKFAPLGFVNRQLVETRQVIKLAANLLASEETKVVTIKANMTHQVRKELDFPKNRNVNNYHHAFDAYLTAFVGIFLSKRYPKLKPYFTYGDFQKGNKLPDLKNFNFLYELKNKDRSIDSNTGEIIWDKQRDLAYMNKIYNFKKVTVVHEVLTKSGALYNQTLYKASEDKASGRGTKQLIRKKDNMPTELYGGYTGSTSAFMSIVRLWKKDKPYYKVVGIPTRMAAKLANQAQLLDYLTKKFTTRKLVKKTGDYKTTVERFELVVPKVGFNQLVIDGGQPFMLGSATYQYNARELFISKEAVKALNKQLSTHVDLVQVFDEILVQVNRWFPLYDTNGFREKLSHGRDRFMKLNDSFEEKSDTQIDVLNRILIGFHANAARTNLKILGLGTDLGFMTQQAGIRLTEKAILVHQSPSGLFERKVALRDLKGLR

SEQ ID NO: 482 - protein, 544 aa, Lactobacillus crispatus
KYYLYFMQLGRDAYTGKPINIDEVSQYYDIDHILPQSFIKDDSLNNRVLVAKPINNGKSDGVPLKLFGDNLATGLGITVKQMWNNWADKGLINKAKQNNLFLDPENINKHQASGFIRKQLVETSQIIKLATTILQAEYPKTKIIVVKASSNHYLRNEFDLYKSREVNDYHHAIDAYLTTICGNLLYQAYPKLRPFFVYGQFKKFSSDPKKENEILKKTKNFDFVAKLLGSKAPNEIRSQQGKVLFEKNKIRLQLNKAYNYKYMLVSRDTTTKNQEMFGMTIYPRAERDIAKSRKLIEKRKGFSTDIYGGYTGTAAAYMAIVRINKTKSSQYKVIAVPMTKRAILNKAEKEGNYEKILKQILSPSILYNDKGKRKAGVISFDIIKGKVPYNQVVQDGNKKFLLKSAIYLCNAKQLVLSEEAMRVITGHWLDSDKQDQELLDVYDEILEKIDRYLPLFDIRDFRNKLHKGREKFLKLNAEDKFKAIIQILKGLHDNSDTGELKDIGITVPFGQLQNNSGITLSSDTILVYQSPTGLFEKRVKISSL

SEQ ID NO: 483 - protein, 298 aa, Lactobacillus crispatus
MDELNKISVNGKKLSVSVKQELYEDLFKKNNTVSAKQLKNWLIENQKLPYIKIKGLADQTKFNSSLSTYIKLKKSGLFVDKLDSNEFRDDFEKIIEWSTIFEDKQIYIQKLQTIDWLTAKQIQFLQNIRLQGWGRLSKKLLTAIVDSNGQNIIEQLWNSQQIFMSIVNKADIKGTITDANQDLMHSNSMEDILSEAYTSPANKKMIRQVVKVVHDIQKAASGQAPKQIAIEFARESRRNSKLSQTRGHKLQDIYQKISGDIVNKNLKDKLAEYIKNNQLSVWEKTSFQMNKNDQDFLF

SEQ ID NO: 484 - protein, 279 aa, Lactobacillus crispatus
MNGKKLSVSVKQELYEDLFKKNNTVSAKQLKNWLIENQKLPYIKIKGLADQTKFNSSLSTYIKLKKSGLFVDKLDSNEFRDDFEKIIEWSTIFEDKQIYIQKLQTIDWLTAKQIQFLQNIRLQGWGRLSKKLLTAIVDSNGQNIIEQLWNSQQIFMSIVNKADIKGTITDANQDLMHSNSMEDILSEAYTSPANKKMIRQVVKVVHDIQKAASGQAPKQIAIEFARESRRNSKLSQTRGHKLQDIYQKISGDIVNKNLKDKLAEYIKNNQLNKDKYYTR

SEQ ID NO: 485 - protein, 538 aa, Lactobacillus crispatus
MQLGRDAYTGKPINIDEVSQYYDIDHILPQSFIKDDSLNNRVLVAKPINNGKSDGVPLKLFGDNLATGLGITVKQMWNNWADKGLINKAKQNNLFLDPENINKHQASGFIRKQLVETSQIIKLATTILQAEYPKTKIIVVKASSNHYLRNEFDLYKSREVNDYHHAIDAYLTTICGNLLYQAYPKLRPFFVYGQFKKFSSDPKKENEILKKTKNFDFVAKLLGSKAPNEIRSQQGKVLFEKNKIRLQLNKAYNYKYMLVSRDTTTKNQEMFGMTIYPRAERDIAKSRKLIEKRKGFSTDIYGGYTGTAAAYMAIVRINKTKSSQYKVIAVPMTKRAILNKAEKEGNYEKILKQILSPSILYNDKGKRKAGVISFDIIKGKVPYNQVVQDGNKKFLLKSAIYLCNAKQLVLSEEAMRVITGHWLDSDKQDQELLDVYDEILEKIDRYLPLFDIRDFRNKLHKGREKFLKLNAEDKFKAIIQILKGLHDNSDTGELKDIGITVPFGQLQNNSGITLSSDTILVYQSPTGLFEKRVKISSL

SEQ ID NO: 486 - protein, 206 aa, Lactobacillus crispatus
MQLGRDAYTGKPINIDEVSQYYDIDHILPQSFIKDDSLNNRVLVAKPINNGKSDGVPLKLFGDNLATGLGITVKQMWNNWADKGLINKAKQNNLFLDPENINKHQASGFIRKQLVETSQIIKLATTILQAEYPKTKIIVVKASSNHYLRNEFDLYKSREVNDYHHAIDAYLTTICGNLLYQAYPKLRPFFVYGQFKKFSSDPKKRK

SEQ ID NO: 487 - protein, 857 aa, Lactobacillus crispatus
MTKLNNEYMVGLDIGTNSCGWVATDFDNNILKMHGKRALGSHLFDEGVSAADRRAFRTTRRRIKRRKWRLKLLEEIFDEEMAKVDPNFFARLKESGLSPLDTRKNVSSIVFPTKKMDKQFYKKFPTIYHLRNALMKQDKKFDLRAIYIAIHHIVKYRGNFLSNSSISNFSASKIEIDRFVNELNDLYSIFLPESGVIFDAGNASKVEDIIRNEQMFKLDKIKEIADVLPDTENKSGLKLSKKISKEISKAILGYKAKFEIILQVNVDKTDSSIWNFKLNDENADVNLSEITSDLTDTQLQILDLVRNLFSAISLLNIVDEGSTLSESMIRKYNDHAQDLKLLKTVIKNHSDRKKAHNLQLAYDKYVNNRHFVDVETKKAFPNKHLYRKSDFYEIVKKNLDASKEAVQIRKEIALDKFMPKQRSDENGVIPFQLNQIELDKIIENQGKYYPFLKEINPIKAHRMQAPYKLDELIRFRVPYYVGPMIEPTNSSYPQTRQNQSFAWMVRKAKGRITPWNFDEKVDRQKSANNFIKRLTTKDTYLFGEDVLPANSLLYQKYTVLDELNKISVNGKKLSVSVKQELYEDLFKKNNTVSAKQLKNWLIENQKLPYIKIKGLADQTKFNSSLSTYIKLKKSGLFVDKLDSNEFRDDFEKIIEWSTIFEDKQIYIQKLQTIDWLTAKQIQFLQNIRLQGWGRLSKKLLTAIVDSNGQNIIEQLWNSQQIFMSIVNKADIKGTITDANQDLMHSNSMEDILSEAYTSPANKKMIRQVVKVVHDIQKAASGQAPKQIAIEFARESRRNSKLSQTRGHKLQDIYQKISGDIVNKNLKDKLAEYIKNNQLSVWEKTSFQMNKNDQDFLF

SEQ ID NO: 488 - protein, 857 aa, Lactobacillus crispatus
MTKLNNEYMVGLDIGTNSCGWVATDFDNNILKMHGKRALGSHLFDEGVSAADRRAFRTTRRRIKRRKWRLKLLEEIFDEEMAKVDPNFFARLKESGLSPLDTRKNVSSIVFPTKKMDKQFYKKFPTIYHLRNALMKQDKKFDLRAIYIAIHHIVKYRGNFLSNSSISNFSASKIEIDRFVNELNDLYSIFLPESGVIFDAGNASKVEDIIRNEQMFKLDKIKEIADVLPDTENKSGLKLSKKISKEISKAILGYKAKFEIILQVNVDKTDSSIWNFKLNDENADVNLSEITSDLTDTQLQILDLVRNLFSAISLLNIVDEGSTLSESMIRKYNDHAQDLKLLKTVIKNHSDRKKAHNLQLAYDKYVNNRHFVDVETKKAFPNKHLYRKSDFYEIVKKNLDASKEAVQIRKEIALDKFMPKQRSDENGVIPFQLNQIELDKIIENQGKYYPFLKEINPIKAHRMQAPYKLDELIRFRVPYYVGPMIEPTNSSYPQTRQNQSFAWMVRKAKGRITPWNFDEKVDRQKSANNFIKRLTTKDTYLFGEDVLPANSLLYQKYTVLDELNKISVNGKKLSVSVKQELYEDLFKKNNTVSAKQLKNWLIENQKLPYIKIKGLADQTKFNSSLSTYIKLKKSGLFVDKLDSNEFRDDFEKIIEWSTIFEDKQIYIQKLQTIDWLTAKQIQFLQNIRLQGWGRLSKKLLTAIVDSNGQNIIEQLWNSQQIFMSIVNKADIKGTITDANQDLMHSNSMEDILSEAYTSPANKKMIRQVVKVVHDIQKAASGQAPKQIAIEFARESRRNSKLSQTRGHKLQDIYQKISGDIVNKNLKDKLAEYIKNNQLSVWEKNSFQMNKNDQDFLF

SEQ ID NO: 489 - protein, 347 aa, Lactobacillus crispatus
MVNLKSLVLILKKENEILKKTKNFDFVAKLLGSKAPNEIRSQQGKVLFEKNKIRLQLNKAYNYKYMLVSRDTTTKNQEMFGMTIYPRAERDIAKSRKLIEKRKGFSTDIYGGYTGTAAAYMAIVRINKTKSSQYKVIAVPMTKRAILNKAEKEGNYEKILKQILSPSILYNDKGKRKAGVISFDIIKGKVPYNQVVQDGNKKFLLKSAIYLCNAKQLVLSEEAMRVITGHWLDSDKQDQELLDVYDEILEKIDRYLPLFDIRDFRNKLHKGREKFLKLNAEDKFKAIIQILKGLHDNSDTGELKDIGITVPFGQLQNNSGITLSSDTILVYQSPTGLFEKRVKISSL

SEQ ID NO: 490 - protein, 534 aa, Lactobacillus crispatus
RDAYTDKPINIDEVSQYYDIDHILPQSFIKDDSLNNRVLVAKPINNGKSDGVPLKLFGDNLATGLGITVKQMWNNWADKGLINKAKQNNLFLDPENINKHQASGFIRKQLVETSQIIKLATTILQAEYPKTKIIVVKASSNHYLRNEFDLYKSREVNDYHHAIDAYLTTICGNLLYQAYPKLRPFFVYGQFKKFSSDPKKENEILKKTKNFDFVAKLLGSKAPNEIRSQQGKVLFEKNKIRLQLNKAYNYKYMLVSRDTTTKNQEMFGMTIYPRAERDIAKSRKLIEKRKGFSTDIYGGYTGTAAAYMAIVRINKTKSSQYKVIAVPMTKRAILNKAEKEGNYEKILKQILSPSILYNDKGKRKAGVISFDIIKGKVPYNQVVQDGNKKFLLKSAIYLCNAKQLVLSEEAMRVITGHWLDSDKQDQELLDVYDEILEKIDRYLPLFDIRDFRNKLHKGREKFLKLNAEDKFKAIIQILKGLHDNSDTGELKDIGITVPFGQLQNNSGITLSSDTILVYQSPTGLFEKRVKISSL

SEQ ID NO: 491 - protein, 278 aa, Lactobacillus crispatus
SVNGKKLSVSVKQELYEDLFKKNNTVSAKQLKNWLIENQKLPYIKIKGLADQTKFNSSLSTYIKLKKSGLFVDKLDSNEFRDDFEKIIEWSTIFEDKQIYIQKLQTIDWLTAKQIQFLQNIRLQGWGRLSKKLLTAIVDSNGQNIIEQLWNSQQIFMSIVNKADIKGTITDANQDLMHSNSMEDILSEAYTSPANKKMIRQVVKVVHDIQKAASGQAPKQIAIEFARESRRNSKLSQTRGHKLQDIYQKISGDIVNKNLKDKLAEYIKNNQLNKDKYY

SEQ ID NO: 492 - protein, 277 aa, Lactobacillus crispatus
SVNGKKLSVSVKQELYEDLFKKNNTVSAKQLKNWLIENQKLPYIKIKGLADQTKFNSSLSTYIKLKKSGLFVDKLDSNEFRDDFEKIIEWSTIFEDKQIYIQKLQTIDWLTAKQIQFLQNIRLQGWGRLSKKLLTAIVDSNGQNIIEQLWNSQQIFMSIVNKADIKGTITDANQDLMHSNSMEDILSEAYTSPANKKMIRQVVKVVHDIQKAASGQAPKQIAIEFARESRRNSKLSQTRGHKLQDIYQKISGDIVNKNLKDKLAEYIKNNQLNKDKY

SEQ ID NO: 493 - protein, 1368 aa, Lactobacillus curvatus
MSRPYNIGLDIGTSSIGWSVVDDQSKLVSVRGKYGYGVRLYDEGQTAAERRSFRTTRRRLKRRKWRLGLLREIFEPYITPIDDTFFLRQKQSNLSPKDQRKLYTQTSLFNDRTDRAFYDDYPTIYHLRYRLMTEKRQFDIREIYLAMHHIVKYRGHFLNEAPVSSFKSSEINLVAHFDRLNTIFADLFSESGFQLETDKLAEVKALLLDNQQSASNRQRQALSLIYTPSTNKAVEKQNKAIATELLKAILGLKAKFNVLTGIEAEDVKAWTLTFNAENFDEEMVKLESSLDDNAHQIIESLQELYSGVLLAGIVPENQSLSQAMITKYDDHQKHLKMLKAVREALAPGDRQRLKQAYDQYVDGQENTKAYSKEDFYGDITKALKNNPDHPIVSEIKKLIELDQFMPKQRTKDNGAIPHQLHQQELDRIIENQQQYYPWLAELNPNSKRQTVAKYKLDELVAFRVPYYVGPLITAEQQRQSSDAKFAWLIRKAEGRITPWNFDDKVDRQASANEFIKRMTTTDTYLLAEDVLPKQSLIYQRFEVLNELNGLKIDDQPITTELKQAIFTDLFMQKISVTVKNIQDYLVSEKRYASRPAITGLSDENKFNSRLSTYHDLKMIVGDAVDDVDKQADLEKCIEWSTIFEDGKIYSAKLNEIDWLTDQQRVQLAAKRYRGWGRLSAKLLTQIVNANGQRIMDLLWDTTDNFMRIVHSEDFDKLITEANQMMLAENDVQDVINDLYTSPQNKKALRQILLVVNDIQKAMKGQAPERILIEFAREDEVNSRLSVQRKRQVEQVYQNISNELLNNTEIRNELKDLSNSALSNTRLFLYFMQGGRDMYTGDSLNIDRLSTYDIDHILPQSFIKDNSLDNRVLVSQKMNRSKADQVPTDFTSVELGQKMQIQWEQMLRAGLITKKKYDNLTLNPDHISKYAMKGFINRQLVETRQVIKLATNLLMEQYGEDNIELITVKSGLTHQMRTEFDFPKNRNLNNHHHAFDAYLTAFVGLYLLKRYPKLKPYFVYGEYQKASQQDKWRNFNFLNGLKKDELVDENTEAVIWDKESGLAYLNKIYQFKKILVTRGVHENSGALFNQTLYAAKDDKASGQGGKQLIPAKQDRSTALYGGYSGKTVAYMCIVRIKNKKGDLYKVCGVETSWLAQLKQLTDEDSQKAFLEQKISPQFTKVKKQKGNIIEAVEEFEVIAPHILINQRFFDNGQELTLGSATYKHNEQELILDKTAVKLLNGALPLTQSEELAEQVYDEILDQVMHYFPLYDTNQFRAKLSTGKAAFMKLPWKSQWDGNKMVQVGQQVILDRILIGLHANAAMSDLKVLKMTTPFGMIQQSTGITLSADTQIIYQSPTGLFERRVALRDL

SEQ ID NO: 494 - protein, 669 aa, Lactobacillus delbrueckii
MAKPKDYTIGLDIGTNSVGWVVTDDQNNILRIKGKKAIGARLFTEGKVAAERRSFRTTRRRLSRRRWRIKMLEELFDEEIAKVDPSFFARLHESWISPKDKRKRYSAIVFPSPEEDKKFHESYPTIYHLRDKLMKDDQKHDIREIYIAVHQMIKARGNFLHDESVETYRSGMSSLGGRSERNILSVQTLEELNDLFAENEGTEEVELNVASAEQINDILTGGHLNADSQKEISNLLLPSSFPSFDDKAKEKQVKKLINNVATNISKAWLGYKADFSTILNLAKVDKDQKKIFAFALQGGDEEDKVQELESLLEQSQTDIVDRLIEIRHAIVLSEIVPVGMTLSEAMIDKYDQHKEDLITLKAVIRNTKDKKKAAKLQAIYDLYVKKRHADLAKAMKLTGIKKRSELLDPEELKKGISSLLDDSPEAVEIKQRLEEKTFLPLQRSNNNGVIPNQLHQVELDEIIKKQSKYYPFLAEKNPDESEEAQKKAPTKLDALLTFRVPYYVGPMITKEEQEAQNGHSFAWMVRRDPQDHEAITPWNFEKKVDKMASATQFIKRMTTKDTYLLGEDVLPASSLKYQLFTVLNELNNLRVNGKKLTSDEKEQVIEGLFKKQKTVKADKFVKYWQAKHIGADIKVKGLSDPSKFNSTMSTYIDFKKIFGDQLNDVNRQR

SEQ ID NO: 495 - protein, 544 aa, Lactobacillus delbrueckii
MTGCADYDVDHIMPQSFVKDDSLDNRVLVARAVNNQKSDKVPALLFGNKVVADLGITVREMWDKWQKLGMISKRKLSNLLTDPDALTEYRAQGFIRRQLVETSQVIKLTATILQSEFPDSKIIEVPAKYNSIVRKQFDLYKSREVNDFHHAIDAYLSTIVGNYLYQVYPNLRRMFVYGEFKKFSSNAEESAHDVARRVKSMNFLDDLLRGTHGDNIYCRSTGEIVFNRNDIISKLKQAYSFKQMLVTQEVFTKKSALFDQTVYPSPERDSKKRSGLIPRKKGMDTEIYGGYSGNKDAYFVLAEAVKEKGHTLQIVGVPIRALNTLKNSANYSEKLLEIIKPQVMFNKDTGKPIKGIKDVKILMDKIPCRQPVLEGESYYMLASSKYRYSLKQISLSQMSMKYILDYIDDPNFNKHEMINIDQQDEKECLLSVYDEILEKMDKYLPLFDIRSFRKKLHDGRDAFIALPVASEEKKPGEVDVIRKILKGLHANADITNLAELGFGTAALGALVSTGGIKISDDAVFIYQSPTGLFERRVKVSDLLK

SEQ ID NO: 496 - protein, 1356 aa, Lactobacillus farciminis
MTKKEQPYNIGLDIGTSSVGWAVTNDNYDLLNIKKKNLWGVRLFEEAQTAKETRLNRSTRRRYRRRKNRINWLNEIFSEELAKTDPSFLIRLQNSWVSKKDPDRKRDKYNLFIDGPYTDKEYYREFPTIFHLRKELILNKDKADIRLIYLALHNILKYRGNFTYEHQKFNISNLNNNLSKELIELNQQLIKYDISFPDDCDWNHISDILIGRGNATQKSSNILKDFTLDKETKKLLKEVINLILGNVAHLNTIFKTSLTKDEEKLNFSGKDIESKLDDLDSILDDDQFTVLDAANRIYSTITLNEILNGESYFSMAKVNQYENHAIDLCKLRDMWHTTKNEEAVEQSRQAYDDYINKPKYGTKELYTSLKKFLKVALPTNLAKEAEEKISKGTYLVKPRNSENGVVPYQLNKIEMEKIIDNQSQYYPFLKENKEKLLSILSFRIPYYVGPLQSAEKNPFAWMERKSNGHARPWNFDEIVDREKSSNKFIRRMTVTDSYLVGEPVLPKNSLIYQRYEVLNELNNIRITENLKTNPIGSRLTVETKQRIYNELFKKYKKVTVKKLTKWLIAQGYYKNPILIGLSQKDEFNSTLTTYLDMKKIFGSSFMEDNKNYDQIEELIEWLTIFEDKQILNEKLHSSKYSYTPDQIKKISNMRYKGWGRLSKKILMDITTETNTPQLLQLSNYSILDLMWATNNNFISIMSNDKYDFKNYIENHNLNKNEDQNISDLVNDIHVSPALKRGITQSIKIVQEIVKFMGHAPKHIFIEVTRETKKSEITTSREKRIKRLQSKLLNKANDFKPQLREYLVPNKKIQEELKKHKNDLSSERIMLYFLQNGKSLYSEESLNINKLSDYQVDHILPRTYIPDDSLENKALVLAKENQRKADDLLLNSNVIDRNLERWTYMLNNNMIGLKKFKNLTRRVITDKDKLGFIHRQLVQTSQMVKGVANILDNMYKNQGTTCIQARANLSTAFRKALSGQDDTYHFKHPELVKNRNVNDFHHAQDAYLASFLGTYRLRRFPTNEMLLMNGEYNKFYGQVKELYSKKKKLPDSRKNGFIISPLVNGTTQYDRNTGEIIWNVGFRDKILKIFNYHQCNVTRKTEIKTGQFYDQTIYSPKNPKYKKLIAQKKDMDPNIYGGFSGDNKSSITIVKIDNNKIKPVAIPIRLINDLKDKKTLQNWLEENVKHKKSIQIIKNNVPIGQIIYSKKVGLLSLNSDREVANRQQLILPPEHSALLRLLQIPDEDLDQILAFYDKNILVEILQELITKMKKFYPFYKGEREFLIANIENFNQATTSEKVNSLEELITLLHANSTSAHLIFNNIEKKAFGRKTHGLTLNNTDFIYQSVTGLYETRIHIE

SEQ ID NO: 497 - protein, 1313 aa, Lactobacillus fermentum
MHYLDEIFAPHLQEVDENFLRRLKQSNIHPEDPAKNQAFIGKLLFPDLLKKNERGYPTLIKMRDELPVEQRAHYPVTNIYKLREAMINEDRQFDLREVYLAVHHIMKYRGHFLNNASVDKFKVGRIDFYKSFNVLNEAYEELQNGEGSFTIEPSKVEKIGQLLLDTKMRKLNRQKAVAKLLEVKVADKEETKRNKQIATAMSKLVLGYKADFATVAMANGNEWKIDLSSETSEDEIEKFREELSDAQNDILTEITSLFSQIMLNEIVPNGMSISESMMDRYWTHERQLAEVKEYLATQPASARKEFDQVYNKYIGQAPKERGFDLEKGLKKILSKKENWKEIDELLKAGDFLPKQRTSANGVIPHQMHQQELDRIIEKQAKYYPWLATENPATGERDRHQAKYELDQLVSFRIPYYVGPLVTPEVQKATSGAKFAWAKRKEDGEITPWNLWDKIDRAESAEAFIKRMTVKDTYLLNEDVLPANSLLYQKYNVLNELNNVRVNGRRLSVGIKQDIYTELFKKKKTVKVSDVASLVMAKTRGVNKPSVEGLSDPKKFNSNLATYLDLKSIVGDKVDDNRYQTDLENIIEWRSVFEDGEIFADKLTEVEWLTDQQRSALVKKRYKGWGRLSKKLLTGIVDENGQRIIDLMWNTDQNFMQIVNQPVFKEQIDQLNQKAITNDGMTLREWVESVLDGAYTSPQNKKAIWQVVRVVEDIVKAVGNAPKSISIEFARNEGNKGEITRSRRTQLQKLFEDQAHELVKDTSLTEELEKAPDLSDRYYLYFTQGGKDMYTGDPINFDEISTKYDIDHILPQSFVKDDSLDNRVLVSRAENNKKSDRVPAKLYAAKMKPYWNQLLKQGLITQRKFENLTMDVDQNIKYRSLGFVKRQLVETRQVIKLTANILGSMYQEAGTDIIETRAGLTKQLREEFDLPKVREVNDYHHAVDAYLTTFAGQYLNRRYPKLRSFFVYGEYMKFKHGSDLKLRNFNFFHELMEGDKSQGKVVDQQTGELITTRDEVAKSFDRLLNMKYMLVSKEVHDRSDQLYGATIVTAKESGKLTSPIEIKKKRPVDLYGAYTNGTSAFMTIIKFTGNKPKYKVIGVPTTSAVGLKRVGKPGSESYNQELHRIIKSNPKVKKDFEIVVPHVSYSQLIVDDDCKFTLASDTYQHPATQLVLSKESMEIIADDFKFVKENTATADEQLVRVFDEIVNQMNHYFTIFDQRSNRQKVTKARDKFVSLPTESEYEGAKKTQVGKTEVITNLLMGLHANSAQGDLKVLGLSTFGFFQSSGGLNLSEDAMIVYQSPTGLFERRICLKDI

SEQ ID NO: 498 - protein, 1327 aa, Lactobacillus florum
MTEQQQPYNIGLDIGTSSIGWAVTDQNDKLLHIRGHNGIGVRLFKEGESAAERRGFRTTRRRLSRRRWRLRFLDRIFDAELAKVDPNFLARLKQSNISPLDPNKQMFGNILFDDPQFDDQKFHQQYPTIYHLRSALAQPDAPQADVRLIYLALHHMIKFRGHFLNGAAVEKFHGGQLHLESEFQELNQIFSNQQRDHVQLQTSSLDEVATILKDNQRTPSDRQRELSARLFVPVDKTIDKENKKLATELLKAVLGLKAKFDVILGVEATDPQAFKLQFSSDDFDDKIAELASELTDEANEILTVLQRLYFSLNLADILTNRQTKQVADSISTAMINRYDDHKHHLKMLKELEAQVTQEQRDGLKKAYDEYIDGDKPTIDTFYTNIKKNLDDSELANQIKSLIDLQAFMPKQRSKENGSIPHQLHQRELDQLIEVQGKYYPWLLAAKDKLDALIAFRVPYYVGPMIDPNQSDDPQNTKFAWMVRKEAGEITPWNFEEKVDKTSSATNFIKRMTTTDTYLLGEPVLPKNSLLYQQFTVLNELNKLKVNGKALTVDQKKYLYEHVCKKQRRVTLKKLSDCLMARGDFPMGAIFTGTTDQKNMNNTLKTYQDFQEIFGDEIDNPDRQVDFEKMIEWSAIFEDREIFKLKLAELNWLTSEQLERVSKKRYQGWGRLSQKLLTHIVNENGERIIDQLWNTNQNFMEIMGQDSVKQAIQEHNGANVAQTGINETIDELYTSPQNKKAIRQILLVVDDIKKAVGYAPANIMMEFAREDRDDHRLIASRARQLEKTYQEISKNWFDNESVTQELKDQIKNKTKFTDRLYLYFIQGGIDLYTGHPLNIDQLSSYDIDHILPQSFLLDNSLNNRVLTSQAENRVHKEDRLPGETVANKMRPTWKMMREQGLMTQRKYNNLTLKPDQISKFNNRGQFINRQLVETRQVIKLAADIMSQKYQADQTKVVTVKANLTHHMREKFNFYKSRNVNDYHHAFDAYLTLFVGNWLLKEYPKLQPYFVYGDFAKTGTNNLKSFNFLYRFERDHKLNDKGAIDTDKDQQLGYMKRIYRFKKMLVTKQLETNEGALYGQTLYPAPKNDKKTRNLINSKKNRPSDIYGGYSNENGSFLTLVKLKKGSKYDYRLVAVPVSKISEIKESELATIEKAIAPQFLKSSGKYRDFQVVLSKILINQKVIDDGMIFTIGSKSYKHNAKQVVLSDNSIQIVSTLSRISDKEKLITVFDEIVDITSKYLPWYKVNDVEKTKMLFRQMQDIDEMKKIIDNSLIGLHCNASITDLGKVGLSKYWGRFVLTAGISLTVDAQLIYQSPTGLFEHRVKVSDL

SEQ ID NO: 499 - protein, 1386 aa, Lactobacillus hominis
MTKITEDYIVGLDIGTNSCGWVAMDSKNTILRMHGKTAIGSHLFDAGNSAADRRAFRTTRRRIKRRKWRLKLLEEIFDSHLAKVDPYFFARLKESGLSPLDTRKNVSSIIYPTSLEDKKFYVDNPTIYHLRYKLMTEDRKFDLREVYLAIHHIVKYRGNFLYNTPVKAFEASKIDVKGSLKKLNELYEGLDSEFNVELDSNNALEIENIIRDKKIFKINKVKEINQLLSLKTEDKERTKLMKDVSKQIVNAILGYKTKFETILLKDVSKDEADDWEFKLTDVDADNKFENLIGDLNENEQEILLVIRKLANAITLSNIVEEGKTLSESMKDKYKKHSDDLKLLKQVISDHPDRDKAKKLALAYDLYVNNRHGKILQAKDILEKKKTLSKEDFYKEIKKNLDDSKESQEILDAISLDSFMPKQRTNENGVIPYQLHQLELDKIIENQGKYYPFLKEVNPVSSHLKQAPYKLDELIRFRVPYYVGPLISPNESTKNKQTKKNQNFAWMIRKEQGQITPWNFDQKVDRMASANKFIKRMTTIDTYLLGEDVLPANSLLYQKFTVLNELNNVKINGKRISVPLKQELYNNLFKKNSTVTTNKLKSYLKENYKLIKVEIKGLSDEKKFNSGLTTYNKLKNLKIFDQQIDDPNYNKDFERIIEWSTIFEDKAIYKEKLKTIDWLSDRQIDKLSKIRMQGWGQLSKKLLSQLTDNNGQTIIEQLWDSQNNFMQIVNQADFKDAIAVANQNLLVDTSVEDILNEAYTSPANKKAIRQVVKVVDDIVKATSGKVPKQIAIEFTRDADDNAKISQSRANKLRKVYKEMSNELASETIRNELERVAKDQKLLKDKHYLYFMQLGRDAYTGELIDIDNLEQYDIDHVLPQSFIKDDSLENRVLVKKAVNNGKSDNVPVKLYGNRMATDLGMTIRHMWEKWKEQGLITKTKYNNLIIDPDKINKYESSGFIHRQLVETSQIIKLVSTILQSKYPDTEIIVVKARYNHYLRKRLNLYKSREVNDYHHAIDAYLSAICGNLLYQVYPYLRPFFVYGQYKKFSSEPEKEKIIYDKTRRYNFISQIFENKDNDIISRETKKKVFDKKDIIEKLKRAYNYKYMLVSRETETHDQEMFKMTVYPRLSRDTKKSRNLIPKKKDMPTEIYGGYTNNSDAYMIIARINKKKGPEYRVFGVPMRELVNLRKAEKNGHYKAYLKQVLEPEIMYSKNGKKNKTISSFEIVKAKVPYKQVILDGDKKFMLASSTYVQNAKQLTLSQYSMQAITDNCENDTEEEKALVEAYDEILTNIDKYLPLFDINKFREKLHAGREKFVDLPLAEKKETILQVLNGLHDNAVMPKIKSLGLSTPLGFMQFHTGVSLSENAKLIYQSPTGLFEKRLKISDL

SEQ ID NO: 500 - protein, 270 aa, Lactobacillus iners
MITYLKDNDDITLSFPKDQLINIFKNSNLNSTEKSDQLKPFFGRTNLEKGIIKLLSGGKQDLSNMFRDETLKNSNYKNLKFSDNRFDDERDGYAADLGDRIDLLILLKQIYDASILESMMSQARVSIDGHKYISSAKVCAYEKHKSDLKRLKSLIKKYLPSEYNNIFRKITEKDNYVAYSKSNITNNKREKALKYVKYVDFTKYLTKKLKTIKTQDAEDDQEIFEIKGELEKQSFLPKQRTLDNSIIPYQLHLMELKKYLIINLNIMTFC

SEQ ID NO: 501 - protein, 255 aa, Lactobacillus iners
MITYLKDNDDITLSFPKDQLINIFKNSNLNSTEKSDQLKPFFGRTNLEKGIIKLLSGGKQDLSNMFRDETLKNSNYKNLKFSDNTFDDERDGYAADLGDRINLLILLKQIYDASILESMMSQARVSIDGHKYISSAKVCAYEKHKSDLKRLKSLIKKYLPSEYNNIFRKITEKDNYVAYSKSNITNNKREKALKYVEYVDFTKYLTKKLKTIKTQDAEDDKEIFEIKGELEKQSFLPKQRTLDNSIIPYQLHLME

SEQ ID NO: 502 - protein, 343 aa, Lactobacillus iners
MLAKDDQEGITVKDKIISLLTFRLPYYIGPVNPAVHGKFAWVKRLANGKVTPWNYKEKIDIDASHEEFIKTKLSKCSFLIGCDVLPKNSLLYQKYMVLSELNTIKFNGVNISEKLKDDIYQNLFKNIQKVTKKRLQNYIKEHENIIGDVIVTGIDNAFKQGLVSYLKFKKIIGDKIDDDRYQKVLEKIIRDITLYDECAGKKIKKEYKDSDLFTEDELNKIVKLTFNDWGRLSAELLDQLEGEDTVSGETGKIIEFMQKHNYNLMQLMSKKFTFKYKIDEINKSYYQHDKFNYKSMIDSLYVSPATKRILWQSLKVVHEISKIMKHDPEKIFYRNGTFQRRSS

SEQ ID NO: 503 - protein, 447 aa, Lactobacillus iners
MLYDHKLIGDKKYARLIRSKAFTDDELAGFIARQLVETRQATKETADLLKRLCPKSRIVYAKAQNASIFRQKFDIPKSRTINDLHHAQDAYLNIVVGNIFDTKFTQDPRNFIKNTKDSRNYNLEKIYDYNVERNNYVAWIAPDSKTNGTIANVKCNLSTKDFRVTRPSFYKKGALFNQNLSRKGSNLAPIKEHSPKSNPLKYGGYSGKNNSFFVVVAGKDNKGKDIVKLIPVNTLIYNKMLHCDYKAKQELLTSYVANNFAINNFRIVKDDIKMYSLVKIDGAYYYLVGGTDERIEVKNAMQLLLSKDSIKAVKILEKESKDQFANIKNYKDIDIKLGRTFNEVISKYTNSVFGKSMLISDKYRKDIFKSVDKSILEFNSLNTIAKADNLLKFVTSMRPAGSVDALKMVGLIERIRKSNVISNFNEFKLINQSVTGLFENEEDLLKL

SEQ ID NO: 504 - protein, 667 aa, Lactobacillus iners
MQKHNYNLMQLMSKKFTFKSKIDEINKSYYQHDKFNYKSMIDSLYVSPATKRILWQSLKVVHEISKIMKHDPEKIFIEMARSKEDHPKRKLSRKADLKQVYKDSKKQIISIIGKDKYQDLSNELDNKDDRDLRWDNLYLYYTQLGRSMYSLKPIDISELMNKNLYDQDHIFPKSKKYDDSIENRVLVEKELNVKKSDIYPISDANIIPQKIKGQVESFWKMLYDHKLIGDKKYARLIRSKAFTDDELAGFIARQLVETRQATKETADLLKRLCPKSRIVYAKAQNASIFRQKFDIPKSRTINDLHHAQDAYLNIVVGNIFDTKFTQDPRNFIKNTKDSRNYNLEKIYDYNVERNNYVAWIAPDGETNGTIANVKCNLSTKDFRVTRPSFYKKGALFNQNLSRKGSNLAPIKEHSPKSNPLKYGGYSGKNNSFFVVVAGKDNKGKDIVKLIPVNTLIYNKMLHCDYKAKQELLTSYVANNFAINNFRIVKDDIKMYSLVKIDGAYYYLVGGTDERIEVKNAMQLLLSKDSIKAVKILEKESKDQFANIKNYKDIDIKLGRTFNEVVSKYTNSVFGKSMLISDKYRKDIFKSVEKSILEFNHLDTIGKADNLLKFVTLMRPSGSAHSLKMVGLIERIRKSNVISNFNEFKLINQSVTGLFENEEDLLKL

SEQ ID NO: 505 - protein, 1395 aa, Lactobacillus jensenii; identical to SEQ ID NO: 118

SEQ ID NO: 506 - protein, 1382 aa, Lactobacillus mucosae
MDIGTNSIGWTAIDDHFSLLRVKGKNAIGVRTFKEGETAADRRGFRTARRRLSRRRWRLQFLDEFFAPYLAEVDPNFLARLKQSDISAKDPAKNQEYMGKLLFPDQEAASDGNGYPTLIQMRKAMPAEKAADFPVFNIYQLRYALMNEKRKFDLREIYLAVHHIVKYRGNFLNNTSVDKFKADQIDFNKSFETLNDLFRQVQPIAPFQIDLTKVDELGKLLLDTKQKKLDRQKAVAKLLPLIEDGTDKEIVKAHQQTAREISKLILGYKAKVGLILQNNLDQTLDMSTENSDDQLMQIAEELDDYQMELINQLSLLYSQIMLNEIVPNGETVSASMLNRYYKHRCQLKELKDYGAAQDKKTREQLDHLYAEYIGQIPKDSKFDFTKDLKKLMDKSDLGQKIKDEIEAGDYLPKQRTSANGVIPHQMHQQELDQIIENQKEYYPWLAEPNPVEKNIKNAKYKLDQLVSFRVPYYVGPMITLADQQKTSKASFAWAVRKKAGKITPWNFYDMIDREKSANNFIKRMTNKDTYLLSEDVLPASSLLYQKFTVLNELNNIRVNGRKLQPALKQAIYTDLFQKRKTVNLKTLTNFLAIHEPTLTKPKIEGLSNGRSFNSSLGTYIDMSKILGDSLDDLNYRDDIEKIIEWSTVFEDSEIYGVKLQEIQWLTNEQREKLVRKRYQGWGRLSKKLLTGITDENGQRIIDLMWDTSKNFMQIVHQPVFEEQIAELNQQLLQDADKAPLEVVDDILADAYTSPQNKKAIRQVVKVVADVVKAVGNAPASISIEFARNEDRNKELKNSRRHSIEKLYHETAEKLVKQTNLLEELGNVKDLNDRYYLYFTQAGRDMYDGTPINIDEISTHYEIDHILPQSFLKDNSLDNRVLVKKSENAAKSDRVPAKLYGAKMRAFWKQLKESQLISNRKYLNLTTDPEQVDKYQMQGFVHRQLVETRQIIKLAANIFGSLYPDSAVIETRAELTKQLREKFSLYKVRDVNDYHHAVDAYLTAFAGHYLYQRYPKLRPMFVYGDYAKIYADDLKRLRSVNLFHDLEKDQYNSGTAVNPETKEKIVDVDWLSDYVSKIQHFKYMLISKAVYTQHGQLYGATILPVAQVDKISAPIGIKDDKPVDIYGAYTNEVAAYMAIVRVNGKKPKYKVVSVPVRMLQRLKMAEQKGHDQYMQTLHDVLLRNFTSLKKNRKTGLKEAVVKDFDVLVPCVRYNQLVIDGDTKFTLGSATYQHNAKQLVLCNHSLETLANNFEYVRKHPDEADERMIMLYDDILDQVNHYFTLYDKNKFREKLNAGRDKYLKLPTFSQFENNKKTAIGKSEAIINILRGLHANAAITNLKCLGVSTPFGQLQSPSGIELSENAKLVYQSPTGLFSREVLLKDL

SEQ ID NO: 507 - protein, 1382 aa, Lactobacillus pentosus
MKKIVNYNLGLDIGTSSIGYAAIDDQGRPVRHQNKTVMGVRLFKEGKTAESTRIFRGTRRRLSHRHWRLGYLDRIFDNEIAKVDENFLPRLKASKRARSDEKRSFRGSLLFPETGDDAYYQKYPTIYHLRYALITQKKQFDIRLIYLALHHMIKYRGNFLDTTPVSAFNIHDIDLTDQFASLNDCYQLLDMDFEFQFDLNNIEQVQKLLLDETLSKTKRQAAVSKVLVMSTGNKAFDDQQNGIASEFIKALLGGPFDLSKILNLSVADVKSWKLHMTDKDVDDTLNSLVEELDENHKQIVNLLQMIYSQVMMLGLLNGQQSISASMIERYDDHAKHWAALKKLLPALGEQEQSTIIHAYTAYTGHSRTKQLSRAEFYTKVNSILKKHENIAEATGLIELIDRNEFMPKQRDAVNGVIPHQLHQRELQLIIQNQQKYYPFLAAKAYPDADETMIEQLLSFRVPYYAGPLVDRDFINESSDQEQAMQNTKFSWLKRREAGEITPWNFEQKVDVQETANRFIKRLTTKDTYLMTEDVLPKESLIYQRFEVLNELNAIRINDRRLTAENKQLAFQQLFMAGNTKNVSIKKFRNFVFDSLKFPEKVKITGFAGQHNFLAKLSTYHDFKKIFGERVDHTDLQPDFERIVEWCTIFEDRHIYREKLKEIQWLSQSEIDQLVLIRNHGWGRLSKRLLTGIRDSDGRTVMDQLWFGTDNFMRIISQSDFAAAIANENRTQLNQHGLEDVLDSAFMSPQNKKAIRQVLKVVDDIEQTLGCPPKKVMIEFTRSPDKKKQRTVTRLEKVQQAYKAVADQLAGQSIVSELDQYANTHSKLSDTYYLYFMQLGRDLYSGKPIDIDSPMLDDDHILPRAFMKDNSLDNRALTEKPINNTKAAKFPSKVFGQQKEVTDFWKLLRRCGLMSNIKEKHLYLDPDNVDKWTRRGFIHRQLVETSQVIKIVANILNDRYQQSQTEVLEVPARLGTELRECFGWYKVREVNDYHHVFDAYLAAFIGNYLYRRYPKLQPYFVYGNFAELNKAQLKNIKSFNFLYNITDNKRVVKDIETGQTLWDDQIRQQIQHIYEYKYMLTSHEAFTQHKELYGQTIYPRREFKPGTLKAIKQDQPQELYGGYKNLTAAYMCIVKIQARKRRAAEYRVVRVATESLSALQQAKRLGVQAYERCLRQELVRNNEILRTNADPNSAPREFEVLLDRVLCHQMIISDGQKYLLGSHAYKINCMQLVLSNNSMKILSTSIVKLKQMTNEPLVQVYREILDVVNKYFTLYDVNSFRENLNQFFDKFRTLPITNEYESSKSGKKLIHRGQLETLTLILRGLHANSDKVQYGDQSTLLGGFQTKDGIKLSKDSVIQYTSPAGLNVRTVKLRDLEQKEAQK

SEQ ID NO: 508 - protein, 1361 aa, Lactobacillus pentosus
MNEPYGVGLDIGTNSVGWTVVDMNGRVRKVKGKTALGARLFKEGATAEDRRGFRTTRRRLKRVKWRLRLLREFFDQPISKIDPNFFARRKYSDISPRDPNYNGLAKTLFNDRTDKEFYDDYATIYHLRDKLMTSNRKFDIREIYLAIHHIVKYRGNFLRTGPASQYGSASLHLATSFQKLNDLFAQSEETLNLKLVTDEALLQQIQQILVRTDLSRSEQQRQIWPLMAVLTGASAAEKKRQKNVVVELSKALVGLKAKMNVVTLTEVDAAVVKDWTFTMEESQDKLPEIEEQLSEVGQQIMDEVIQLYASVNLAQLIPAGKRFSQHMVEKYKHHEKNLELLKAYIHSQSDSKRGREIRATYDRYIDGVDSKPVTQEMFYKDLMKYVEADATSNHLAAEIKDEIDSEQFMPKLRTKQNGSIPYQVQQYELDQIISHQKKYYPWLGEENPVAERRGKFPYKLDELVGFRVPYYVGPLITKEDQQATSGAGFAWMVRKADGPITPWNFDQKVDRIASATAFIQRMQTTDTYLIGEDVLPARSLIYQRFMVLNELNNMRVEDRKLAPQQKQRLYNQVFKQHQHVSVKNIQQNLMDAGEYRKTPQITGLADPKGFNSSLSTYHDFKKILLEAIADEHKRADIEKIILWSTTFEDSAIFKQKLEEVAWLTDAQRKQLSGLRYRGWGQLSHKLLTAFKDDKGRSIMDGLWETSDNFMQLRKQPAIETQIKEANQANLTDADIQDTINELYTSPQNKKAIREVMLVLDDIKNAMHGQTPSWIFVEAARGGGVAGRRTQSRSSQIVEAYKGTAKEIVSEKVQHELNEKIKAKADFNTRLVLYFLQNGRDLYTNEAINIDRLSEYDIDHILPQSLVKDDSLDNRVLTSARINREKNDTFASEKFGRKMGAQWRELHRNGLMTQRKLKHLLMRPDEISKHATDFINRQLVETRQVIKLVEELISSEYPAASIVAVKANLTHQFRQTFNFPKLREVNDYHHAFDASLTAFIGMYLLKQYPKLERFFVYGKFAKQPINLTRFNIIRKLAVAEKPIANIETGEILWDKTADIKYFEKLYNYKRLLVTHEVRENYGAMFKQTLFKASYNKSKTLVPKKNHMETSVYGGYSNQETAYLAIVRIPFKSGFKFIVVGIPTRMVAKIKHYQSLGATLNQATHKVIEPKFTKISRKTKQTVISDYEVVLPKVYLDQVVRDQVKGQMYRFSLGSDKEYHNVQELYLPLSIQQAFVGHYDESDDQRSNDLVKVYDAALKQLQRYFPLHLSRNFDQVASQAHQSFEGLKNNVQTSDKQLGKKEVLNSLFVGLHANATRSNLSVLGMSKDFGRIKSNGITLTDQAEIIYQSPTGLFERKVALKDL

SEQ ID NO: 509 - protein, 1358 aa, Lactobacillus pentosus
MNEPYGVGLDIGTNSVGWTVVDMNGRVRKVKGKTALGARLFKEGATAEDRRGFRTTRRRLKRVKWRLRLLREFFDQPISKIDPNFFARRKYSDISPRDPNYNGLAKTLFNDRTDQEFYHDYPTIYHLRDKLMTSDRKFDIREIYLAIHHIVKYRGNFLRTGPASQYGSASLHLATSFQKLNDLFAQSEESLNFKLVTDEAQLQQIQQILVRTDLSRSEQQRQIWPLMVVLMGATAAEKKRQKDFAKELANALVGLKAKLNVVTLTNVDTTVVKDWTFTLEESQDKLPEIEEQLSEVGQQIMDEVIQLYASVNLAQLIPAGKRFSQHMVEKYNHHEKNLELLKAYIHSQSDSKRGREIRATYDRYIDGVKSKPVTQEMFYKDLMKYVEADATSNHLAAEIKDEIDSEQFMPKLRTKQNGSIPYQVQQYELDQIISHQKKYYPWLGEENPVAERRGKFPYKLDELVGFRVPYYVGPLITKEDQQATSGAGFAWMVRKADGPITPWNFDQKVDRIASATAFIQRMQTTDTYLIGEDVLPARSLIYQRFMVLNELNNMRVEDQKLAPRQKQRLYNQVFKQHQHVSVKNIQQNLMDAGEYRETPKITGLADPKGFNSSLSTYHDFKKILPEAIADEHKRADIEKIILWSTTFEDSAIFKQKLEEVAWLTDAQRKQLSGLRYRGWGQLSHKLLTAFKDDNGRSVMDGLWETSDNFMQLRKQPAIETQIKEANQANLTDADIQDTINELYTSPQNKKAIREVMLVLDDIKNAMHGQTPSWIFIEAARGGGVAGRRTQSRSKQIVEAYKSTAKEIVSEKVQHELNEKIKAKADFNTRLVLYFLQNGRDLYTNEAINIDRLSEYDIDHILPQSLVKDDSLDNRVLTSARINREKNDTFASEKFGRKMGAQWRELHRNGLMTQRKLKHLLMRPDEISKHATDFINRQLVETRQVIKLVEELISSEYPSASIVAVKANLTHQFRQTFNFPKLREVNDYHHAFDASLTAFIGMYLLKQYPKLERFFVYGKFAKQPINLTRFNVIRKLAVAEEPIANIETGEILWDKTADIKCFEKLYNYKRLLVTHEVRENYGAMFDQTIFKATDSRKRLIQKKKGFATETYGGYTGRTLAYLAIVKVVTNKDTQYQVVGIPTTMVTQIQQLEASGLTSKQAVTKAIGAMINENNKKLQSYEVLLPKVRFEQVVRDEVKGHIHRFALGTDTYYHNIQELYLPLTIQRAFLGKRNDTDAQTEQNLLTVFETTLAQVNRYFPLYEMNKFKQILNSAQEKFAALPTKNKTVKNKLVTGKDGVLNNLFIGLHANASLGDLKILGMKIGFGKLQVPGGLKLTDQAEIIYQSPTGLFERKVALKDL

SEQ ID NO: 510 - protein, 1358 aa, Lactobacillus plantarum
MKEPYGVGLDIGTNSVGWTVVDASGHVRKIKGQTGIGVRLFKEGAAAADRRGFRTTRRRLKRVKWRLRLLREFFDQPISKVDINFFARRKYSDVSPRDPNYNGLEKTLFNDRSDQDFYHDYPTIYHLREALMTQHRKFDVREIYLAIHHIVKYRGNFLRNDAATAYRSGTLDLQQHFETLNHLFSQADLELNLNLTTDVALLDSIKQTLVRTDISRSDRQKLIMPLLAVLTGATTAEKKRQKAVVTEFAKALVGNKTKIDVLTLTDIDATEAKDWAFSLEENQDKLPGIEDRFSEVGQQIIDEVIRLYASVNLAQLIPEGKRFSQSMVEKYKRHGEDLKLLKAYIRSQSDAKRGRAIRATYDQYIDGVKSKQVTQEAFQKALGKFVDADVDLNSWAAQIKQAIDSEQFMPKLRTKQNGAIPYQVQQNELDQIISNQKEYYPWLGEENPVIKRRGKFPYKLDELFGFRVPYYVGPLITKEMQAATANAGFAWMVRKADGPITPWNFDDKVDRVASATAFIQRMQTTDTYLIGEEVLPARSLIYQRFMVLNELNNIRVDDGQLTPRQKQRLYNQVFKKHKRVTAKNIQDNLVAAREFPTAPRITGLADPKVFNSSLSTYHDLKQVLPEAMSDVRKQADIEKIILWSTIFEDSTIFKQKLTEISWLTAAQLKQLGQLRYRGWGQLLRKLLTGLKDDNNRSIMDGLWETNANFMQLRSQPAIENQIKSANQANLTTADLQDTINELYTSPQNKKAIREVMVVLADIKDAMHGQTPNWIFVEAARGGGVAGRRTQSRSKQIVAAYQGTAQAIVRDQVQRELKEKIKNKANFNTRLVLYFLQNGRDLYTGDAINIDRLSEYDIDHILPQSLVKDDSLDNRVLTNARINREKNDTFASEKFGKKMGAKWKEMHRMGLMTKRKLDHLLMRPDEISKYATGFINRQLVETRQVIKLVEELINAEYPSTAIVSVKANLTHQFRQTFDFPKIREVNDYHHAFDAALTAFIGTYLLKRYPKLERFFVYGKFAKQPVNLTRFNVIRKLAKTDTPITDIDTGEVLWDKLTDIKYFETLYDYKRLLVTREVSENYGAMFDQTLLKASDNGKRLIRKKQSFDTAIYGGYTGKTLAYMAIVKVSTKKDVQYQVVGVPTTMVTQIEQLEQQGMTNKQAVTKVIEPLIAANNKKMLTYEVLLPKVRFEQVVRDRIKGQTHRFALGTDTYYHNIQELYLPLTLQRAFLGKQNESEVQLNQNLLTVFDATLAQVNRYFPLYEMNKFKKILNSARDQIELLEAKNQFVKNKLVLGKQGILTNMFIGLHANASYGDLKVLGVKIDFGKLQVPGGIKLTGDAEIIYQSPTGLFERKIALKDL

SEQ ID NO: 511 - protein, 1361 aa, Lactobacillus rhamnosus
MTKLNQPYGIGLDIGSNSIGFAVVDANSHLLRLKGETAIGARLFREGQSAAERRESRTTRRRLSRTRWRLSFLRDFFAPHITKIDPDFFLRQKYSEISPKDKDRFKYEKRLFNDRTDAEFYEDYPSMYHLRLHLMTHTHKADPREIFLAIHHILKSRGHFLTPGAAKDFNTDKVDLEDIFPALTEAYAQVYPDLELTFDLAKADDFKAKLLDEQATPSDTQKALVNLLLSSDGEKEIVKKRKQVLTEFAKAITGLKTKFNLALGTEVDEADASNWQFSMGQLDDKWSNIETSMTDQGTEIFEQIQEHYRARLLNGIVPAGMSLSQAKVADYGQHKEDLELFKTYLKKLNDHELAKTIRGLYDRYINGDDAKPFLREDFVKALTKEVTAHPNEVSEQLLNRMGQANFMLKQRTKANGAIPVQLQQRELDQIIANQSKYYDWLAKPNPVEKHRASKPYQLDELLTFRIPYYVGPLITPKEQAESRENVFAWMIRKDPSGNITPYNFDEKVDCPASANMFIQRMKNTDTYLIGEDVLPKRSLLYQKYEVLNELNNVSIDGRRLGADQKQRLIREVFERHSSVTIKQVAENLVAHGDFAKRPEIRGLADEKRFLSSLSTYHQLKKILHEAIDDPTKEHDIENIITWSTVFEDAAIFKTELAKISWLDSDTIKALSNIRYRGWGQFSRKLLDGLKLGNGHTVIQELMLSNHNLMQILTDETLKTTMAELNQDKLKADDIEDVINDAYTSPSNKKALRQVLRVVEDIKHAANGQDPSWLYIETADGPGTAGKRTQSRQKQIQTVYANAAQELIDSAVRGELEDKIADKASFTDRLVLYFMQGGRDIYTGAPLNIDQLSHYDIDHILPQSLIKDDSLDNRVLVNATINREKNNVFASTLFASKMAATWRKWHEAGLISGRKLRNLMLRPDEIDKFAHGFVARQLVETRQIIKLTEQIAAAQYPNTKIIAVKAGLSHQLREELDFPKNRDVNHYHHAFDAFLAARIGTYLLKRYPKLAPFFTYGEFAKVDVKKFREFNFIGALTHAKKNIVAKDTGEIVWDKERDIQELDRIYNFKRMLITHEVYFETADLFKQTIYAAKDSKERGGSKQLIPKKQGYPTQVYGGYTRENTAYLAVVKTVEKKADVYRVVRIATSQVAALKEARAQSTVKERELLKKFLTTKFTKIGKNGKKAITPFDIVIPRVPREQLFHNKRYGFFMVNSDTLMHNYQELWMSRSDQQILSKLVKSAKTVENGQVGRLFENIVEQINKYFPLYDINQFRKKLDQSKDIFSKLPLEGNGTTSGKRETIQNILTGAGTGAKNGDLKNLGIKTPFGFLQVPSGIVLDDDTTLIYQSPTGMLNRIVRLSEL

SEQ ID NO: 512 - protein, 1361 aa, Lactobacillus rhamnosus
MTKLNQPYGIGLDIGSNSIGFAVVDANSHLLRLKGETAIGARLFREGQSAAERRESRTTRRRLSRTRWRLSFLRDFFAPHITKIDPDFFLRQKYSEISPKDKDRFKYEKRLFNDRTDAEFYEDYPSMYHLRLHLMTHTHKADPREIFLAIHHILKSRGHFLTPGAAKDFNTDKVDLEDIFPALTEAYAQVYPDLELTFDLAKADDFKAKLLDEQATPSDTQKALVNLLLSSDGEKEIVKKRKQVLTEFAKAITGLKTKFNLALGTEVDEADASNWQFSMGQLDDKWSNIETSMTDQGTEIFEQIQELYRARLLNGIVPAGMSLSQAKVADYGQHKEDLELFKTYLKKLNDHELAKTIRGLYDRYINGDDAKPFLREDFVKALTKEVTAHPNEVSEQLLNRMGQANFMLKQRTKANGAIPVQLQQRELDQIIANQSKYYDWLAKPNPVEKHRASKPYQLDELLTFRIPYYVGPLITPKEQAESRENVFAWMIRKDPSGNITPYNFDEKVDCPASANMFIQRMKNTDTYLIGEDVLPKRSLLYQKYEVLNELNNVSIDGRRLGADQKQRLIREVFERHSSVTIKQVAENLVAHGDFAKRPEIRGLADEKRFLSSLSTYHQLKKILHEAIDDPTKEHDIENIITWSTVFEDAAIFKTELAKISWLDSDTIKALSNIRYRGWGQFSRKLLDGLKLGNGHTVIQELMLSNHNLMQILTDETLKTTMAELNQDKLKADDIEDVINDAYTSPSNKKALRQVLRVVEDIKHAANGQDPSWLYIETADGPGTAGKRTQSRQKQIQTVYANAAQELIDSAVRGELEDKIADKASFTDRLVLYFMQGGRDIYTGAPLNIDQLSHYDIDHILPQSLIKDDSLDNRVLVNATINREKNNVFASTLFASKMAATWRKWHEAGLISGRKLRNLMLRPDEIDKFAHGFVARQLVETRQIIKLTEQIAAAQYPNTKIIAVKAGLSHQLREELDFPKNRDVNHYHHAFDAFLAARIGTYLLKRYPKLAPFFTYGEFAKVDVKKFREFNFIGALTHAKKNIVAKDTGEIVWDKERDIQELDRIYNFKRMLITHEVYFETADLFKQTIYAAKDSKERGGSKQLIPKKQGYPTQVYGGYTRENTAYLAVVKTVEKKADVYRVVRIATSQVAALKEARAQSTVKERELLKKFLTTKFTKIGKNGKKAITPFDIVIPRVPREQLFHNKRYGFFMVNSDTLMHNYQELWMSRSDQQILSKLVKSAKTVENGQVGRLFENIVEQINKYFPLYDINQFRKKLDQSKDIFSKLPLEGNGTTSGKRETIQNILTGAGTGAKNGDLKNLGIKTPFGFLQVPSGIVLDDDTTLIYQSPTGMLNRIVRLSEL

SEQ ID NO: 513 - protein, 1352 aa, Lactobacillus ruminis
MNDNFDLMRVKGKKGIGVRLYNEGQSAAERRMHRTARRRYGRRKWRLRLLEDFFDEHMAEVDDTFFARLKDSNISPKDDKKYRKSLLFPKSKGVTYQDDGEFYKKYPTMYHLRYALMTEHRKFDLREIYLAFHHMVKYRGNFLYDTSVDSFEAKNLDIKGKFDEINDLLSSYTDFYVDNSNAALVESILLEKNTTRKDKSKKIAKLLHVEDKEKGKNKKAKDLATQISNAVLGLKCNFHLIFELQQKYSFDLCSEKTEENIAKLSEVLDENQKMLLMILKEVQDQVMLNAFVPSGMSLSEAMMQKYDDYGEQLKIYHELEHSVSDDSAAKLRGAYRDYNDNIIKRIDGDNKKDTFYKRVKNILTKISKEYVDQDVLESCGKLKKLIDENKLFIRQRTAANGVLPHQLHQIEMRKIIDNQKEYYPWLAEPNPNEKRRVYSKYKVEELIAFRIPYYVGPLVDPNNADKNKEARFSWMVRKKDGEITPWNFYDKVDWAESANNFIERMKSKDTYLLGEDVVPKESMLYQKYEVLNELNNLRINDSGLSDSFEDVKLKQAIYNDLFKKQKIVKITDLQNYLVQNHKYLVKPKISGLADENRFLSSLSTYSDLKTIFGDKVDDRTYFNDFEKMVEYSTVFEDGHDYNQKLDEYTWLTKEEKYKIGKKRYRGWGKLSKKLLTGLRDKNNHTIMDNLWETNRNFMQIQTADEFSKQIAEENERHLKGSVSDAINDMYTSPANKKAIRQVLRVVDDIQKAMGYAPSSISLEFAREDGPSVRTVSRANRMKSIYEKYASEVSEEVMKDLDGVIKDKKGLNDRLYLYFEQQGKDMYSGHPLDFDKVISGQEYDIDHILPQAVIKDDSLDNRVLTTKALNNDVKSKGVPCRMFNGMHSFWKNLYDKGFISRRKFNNLTTNPENIDKYKMKGFVNRQLVETRQIIKLVANVLNDKYQNDDVDIIEVRAELTHDVRKHFKFYKNRNVNDYHHAFDAYLTSFIGHYLFKKYPNLRPLFDYNDFMKVSDNVFKQLRGNNFLGEFLNKTGDIISTDGNFVLNKEEMINKLNKAYAFKKILVTKEVGQRTGAMFNETRYPAPNSRKAALKYRRMPKPDSLISVKDYKNTDIYGGYSGKNDAYMVIVDMGKQYMVVGVPVRYTEKLDKLRIKHSELYRDELRKVLSRDKTLLDSKGNVKRFDIVLDRVLYGQLIEDGNELFTLGSSKYKRNFRQLFLDKQCIEILDSSATPQPTDEELIWVYDQILDKVDKYFELYDINRQRETLRKGRAAFCSLPNISMKKDDVTKKKILNEILVALHANESESNCEKIGKKVFGRLQVPGGIKLSKEAKLIYQSPTGLFERVVYLKDL

SEQ ID NO: 514 - protein, 1339 aa, Lactobacillus salivarius
MERYHIGLDIGTSSIGWAVIGDDFKIKKKKGKNLIGTRLFNEGATAAERRGFRTQRRRLNRRKWRLKLLEEIFDPYMAEVDEYFFARLKSSNLSPKDSNKKYLGSLLFPDKSDSNFYDKYPTIYHLRRDLMEKDEKFDLREIYLAIHHIVKYRGNFLEKVPAKNYKNSGASIGFLLEEVNSLYKDIIGDESIAILNSEKFEDVEKIILDEETRNLDKQKSVGKLLVEDKKKKNIVTAFSKAIFGYKFNIEDLLLIENDEKNKLTFNDENIDDIFNELSHSLDDKQMDLLTKTREIYFKFKLNMIVPTGYTLSESMIEKYEMHKAHLKMYKEFINTLNTKDRKILKNAYSDYINTEKAKAANAQENFYKTVKKIIKDNNSDTAKKIIVLIDEGNFMPKQRTGENGVIPHQLHQIELDRIIENQAKYYPWLAEANPVEKNRKFAKYKLDELVTFRVPYYVGPLIDKTESNKNEKETKFAWMVRKAKGTITPWNFENLVDRTESANRFIKRMTSKDTYIIGEDVLPASSLLYEKFKVLNELNNIKVNEKKLDIEQKQDIYLNLFTTAKNVTKKSLATYLNCSADSISGLSDGEKFNSSLSSYIDLKAILGNIVDDCNKNEDLEKIIEYSTVFEDGNIYKEKLSEISWLTDEQIEKLSNIHFKGWGRLSKKLLTQITNENGERIIDALWNTSNNFMQIINDESIQAKLAEINGKYAGKSDLEDILSEAYTSPQNKKAIRQVMKVVEDIEKAMQCEPTSISIEFTRKKQKSRLTNTRYKKISDVYEKIADEVISEYELRKLQSELDSNANNMRDRYYLYFMQLGRDMYTGEKINIDELHQRYDIDHILPQSFIKDDSINNRVLTRKDVNNKEKSDKTAADLYAVEMSDFWRKLRKQGLITEQKYKNLLTKSDSIDKYAKKGFIKRQLVETSQVVKLVANILQDKYSDTKIIEVRAKLNSNLREEYKLIKNRAVNDYHHAIDGYLTTFIGQYLYKTYPKLRSYFVYNDFKKLDSNYLKHMKKFNFLWQLQDDKTIDIYDNVNNKFVLNVPEMKKYIQKIYNYKYMLVSKEVTTKNGAFYDQTKYNAKTVNLIPIKKNKPTNIYGGYKGKVSSYMMLVKIRKKKEVIYKFVGVPRLWTDELDRLKDTTERKILLNEIAKNSLSKTEQDFEVILDKVYYGQLIIDGNQKYTLGSSEYKYNAMQLHLSKHALEVLAKENVKDAEITDKDLVSVYEEILSVVNKYFELYDINKFRQKLNEGLEIFRKLPVYNVYESNKIKQVGKFEVLNRILMGLHANAMITDLKVLGIKTKLGQMQVNGGIKLSPDAKLIYQSPTGIFSRAVRVKDLG

SEQ ID NO: 515 - protein, 629 aa, Lactobacillus salivarius
MERYHIGLDIGTSSIGWAVTGDDFKIKRKKGKNLIGTRLFKEGNTAAERRGFRTQRRRLNRRKWRLKLLEEIFDPYMAEVDEYFFARLKDSNLSPKDSNKKYLGSLLFPDISDSNFYDKYPTIYHLRRDLMEKDEKFDLREIYLAIHHIVKYRGNFLENVPAKNYKNSGASIGFLLEEVNNLYKDIVGDENVTILNSEKFEDVEKIILDDGIRNLDKQKGVGKLLVEDKKNKNLVTAFSKAIFGYKFNIEDLLLVEGDEKSKLTFNDENIDDIFNELSHSLDDRRMDLLTKTREIYFKFKLNMIVPTGYTLSESMIEKYEIHKAHLKMYKEFINTLNSKDRKILKNAYTDYINNEKAKAANAQENFYKTVKKTIKDNDSDIVKKIIDLIDEGNFMPKQRTGENGVIPHQLHQIELDRIIENQAKYYPWLAEENPVEKNRKFAKYKLDELVTFRVPYYVGPLVDKTESNKNEKETKFAWMVRKSKGTITPWNFENLVDRTESANRFIKRMTSKDTYIIGEDVLPASSLLYEKFKVLNELNNIKVNEKKLDIEQKQNIYLKLFTTTKNVTKKNLATFLNCSIESISGLSDDKKFNSSLSSYIDLKVILGDIVDDYSKNEDLEKIIEYSTIF

SEQ ID NO: 516 - protein, 897 aa, Lactobacillus salivarius
  misc_feature (822)..(822): Xaa can be any naturally occurring amino acid
MLIESDEKNKLTFNDENIDDIFNELSHSLDDNQMDLLTKTREIYFKFKLNMIVPTGYTLSESMIEKYEMHKAHLKMYKEFINTLNAKDRKILKNAYSDYINNEKAKAANAQENFYKTIKKTIKDNNSDTAKKIIGLIDEGNFMPKQRTGENGVIPHQLHQIELDRIIENQAKYYPWLAEENPVEKNRKFAKYKLDELVTFRVPYYVGPLVDKTESNKNEKETKFAWMVRKAKGTITPWNFENLVDRTESANRFIKRMTSKDTYIIGEDVLPASSLLYEKFKVLNELNNIKVNKKKLDVEQKQHVYLDLFTTRKNVTKDNLATSLNCDVESITGLSDNEKFNSSLSSYIDLKAILGNAVDDCNKNKDLEKIIEYSTIFEDGNIYKEKLSEISWLTDEQIEKLSNIHFKGWGRLSKKLLTQITNENGERIIDALWNTSNNFIQIISDESIQAKLAEINGEYADKSNLEDILDEAYTSPQNKKAIRQVMKVVEDIEKAMKCKPTSIAIEFTRRKGKSKLTNTRYKKISETYEKITDELISEYELGKLQSKLDSKANNMRDIYYLYFMQLGRDMYTGEKINIDELHQYYDIDHIFPRSFIKDNSLNNRVLTRKEINNNEKADRTAADLYAVKMGDFWRKLRKQGLITEKKYKNLLTRTDSIDKYTKQSFIKRQLVETSQVVKMAANILQDKYSNTKIIEVRARLNSDLRKEYELIKNREVNDYHHAIDGYLTIFIGQYLYKTYPKLRSYFVYDDFKKLDSNYLKHMDKFNFIWKLEDKKAEDVYDNVNNEFILNVPKMKDYIQKIYNYKYMLISKEVTTESGAFYXZTKYNAKTINLIPIKKDKPTNIYGGYKGKVSSYMMLVKIQKKKEVIYKFVGVPRLWTDELDRLIDTDEKKALLKK

SEQ ID NO: 517 - protein, 1419 aa, Lactobacillus sp.
MAKPQNYTIGLDIGTNSVGWTVTDDQNNILRIKSKKAIGARLFEEGKVAAERRSFRTTRRRLSRRKWRIKLLEELFDEEISKVDPNFFARSHESWISPKDKRERYSAIVFPTPEEDKKFHNEYPTIYHLRDRLMKDDQKHDIREIYVAIHHIMKYRGNFLHDESIETYRSGMSSLGGGDERTILNTKILDDLNDAFADNLATQGISVNSASADQINEIVTSGHLNVDSQKAIAKLLLPTTLSSDDKKQDKKIKKLATDAAKNVASAWLGYKANFAAILNIQEVDKDKKKIYSFALQGADEEDKVETLESVLSQDQIEIVDRIIRIRHAIVLGEIIPVGMTLSEAMIEKYDQHAKDLKNLKTVIRNLKDRKNAVKLQAIYDLYVNNRHADTAKAMKLAGVKKRTELLEPEEFNKSIEKLLDDSPVSAEIKKRIAEKDFLPLQRSNSNGVIPNQLHQIELDEIIKKQSKYYPFLGETNEHASADVARKAPTKLDQLLTFRVPYYVGPLITKEEQEEQDGHSFAWMIRKNPKDHEKITPWNFDEKVDRMASATQFIKRMTTKDTYLLGEDVLPSSSLKYQLFTVLNELNNLRINHKKLTREEKEQVIEDLFKKYKTVKADKFKNYWQKGHAGLDVKIQGMADPEKFNSTMSTYIDLQKIFGDQLDDAQRQNDFEKIIEYSTIFEDRKILGEKLRADFVWLSEDQIKRLCRLRLQGWGRLSLKLLTRLTDADGQNVLERLLNSNDNFMQIVKDPVIKAKIEQKNQKLLRADWSENATESILDEAYTSPQNKKAIRQVMRVVHDIVKACDGNLPAKFAIEFARSQDDDPKRTVARADRLQKIYAQISDEVVSQGVKDQLSGMKSLKDRYYLYFMQGGRDAYTGKPLNIDRLSDYDIDHIMPQSFIKDDSLDNRVLVTRAVNNQKSDNVPVLLYGNHLVADLGITIREMWDRWQKSGMISKRKLANLLTDPATLSEYRAEGFINRQLVETSQVIKLTATILQSEFPDSKIIEVPAKYNSILRKQFDLYKSREVNDYHHAIDAYLSTIVGNYLYQVYPNLRRLFVYGEFKKFSHGEEESSHQAVRRVKSMNFLDDLLRGKHGDDIYCRVTGEVIFSRKDIISKLKQAYSFKQMLVTQEVFTKKSALFDQTVYPSPARDSKTRSGLIPRKQGMDTEIYGGYSGNKDAYFVLAQVVKSKGHTLQVVGVPIRALRALANCSNYSEQLLKIVKAQVLFNKKTGKAKKGISDVRILLDKIPYRQPVLDGSAFYMLGSSTYKYNLKQISLSQQSMKYILDYIDDPNFNKHEMTKIDQQNEKECLLSVYDEILDKMDKYLSLYDINGFRKKLHVGRDKFIKLEVEKQAEAIKNVLRGFHANSDMTKLSDLGLSTSLGFMQASDGIKLSDNAVFIYQSPTGLFERRVKVSDLLK

SEQ ID NO: 518 - protein, 1289 aa, Lactobacillus versmoldensis
MRRRYRRRRNRLNWLDELFADELAKIDPSFLLRMKNSWVSKKESTRKRDPYNLFIDEKYNDVDYFNQYPTIFHLRKELITEDKKVDIRLIYLAIHNIIKYRGNFTLENQNFDISQLSSNFSQQISDFFALFSDFGVIMPEDFDPDKISDILLNPNLSPSGKVSEAIATISPKTNVKAKIKIILLLLVGNNGDLKKLFDLETTEKIAVKLSSRHIDSELPIILSELNEQQENIITIANSIFGSIILKDFLGDETSISAAKVISFEDHKQDLQKLKTMWRETSNKEAVKAGKKAYEDYIGHEDSETFYKKIKKFLEKAQPVDLANKALAEIELENYLPKQRNRNNTVIPYQLNENELIAILDHQEKYYPFLKENRDKILSLLTFRIPYYVGPLQDSNNNRFSWMTRKASGAIRPWNFSEKVNVEQSSNDFIKRMRSTDTYLIGEPVLPKKSLIYQCYEVLSELNNTRVKDGSSNPKRLDVTIKQRIYNEIFKNQKSVSVKVLQNWLIKESYFKSPEISGLADKKKYLSSLSTYIDFKKIFGQRFVDDPVNSPQLEELAEWLTLFEDKKILLIKLQNSKYSYDQATINKLSTMRYQGTGKLSKKLLVDLKTTKKSIGKSGAESLSILDLMWSTKDNFMQIIHDADYTFEQQIKEFNYDTEDELTPLEKVANLHGSPALKRGLNQSIKVVADIVKFMGHDPEKIFIEFTRSDDFSKLTISRYRRIKKQYLEIAKAIKKIPAEFKDIKEYQTQLEENKGKLASERLMLYFLQCGHSLYSNKPIDLNMINSSKYHVDHILPQSYIKDDSLENKALVLASENENKIDNMLISHDIIATNLPRWQALKDQNLMGSKKFADLTRTTVTENQKKGFIQRQLVQTSQIVKNITLILNDLYKNTSCIETRATLSSEFRKAFSNFDETTYHYQFPEFVKNRDVNDFHHAQDAFLACVIGEYQLKKYPKDNLRLVYDQYSKFLDSLKKDTRKKNGRMPRYTQNGFIIGSMFNGKTYVDDNGEIIWDQKIKESIRKTFNYHQFNVVRQTIEQHGKLFNDTIQPHSDRYKLIPLKTNRDPAIYGGYNNDNNAYSVVLDVDGKKKINGIPIRIANQLKSDELDLSSWLENNIKHKKPMTILIDKVPKYQRIINEETGDLLITSANEVINNVQLFLPSMYTALISLLDSTKTEMYSKLLSNYEANILIDIYDYLLTKLKNNYPLYRKEWAKLAEHRDDFIESDLVTQASTLQQLIKFMHADPSNVNLKFGNFKGNRFGRKNGNIKLSKTDFIYESPTGLFKSIKHID

SEQ ID NO: 519 - protein, 1372 aa, Legionella pneumophila
MESSQILSPIGIDLGGKFTGVCLSHLEAFAELPNHANTKYSVILIDHNNFQLSQAQRRATRHRVRNKKRNQFVKRVALQLFQHILSRDLNAKEETALCHYLNNRGYTYVDTDLDEYIKDETTINLLKELLPSESEHNFIDWFLQKMQSSEFRKILVSKVEEKKDDKELKNAVKNIKNFITGFEKNSVEGHRHRKVYFENIKSDITKDNQLDSIKKKIPSVCLSNLLGHLSNLQWKNLHRYLAKNPKQFDEQTFGNEFLRMLKNFRHLKGSQESLAVRNLIQQLEQSQDYISILEKTPPEITIPPYEARTNTGMEKDQSLLLNPEKLNNLYPNWRNLIPGIIDAHPFLEKDLEHTKLRDRKRIISPSKQDEKRDSYILQRYLDLNKKIDKFKIKKQLSFLGQGKQLPANLIETQKEMETHFNSSLVSVLIQIASAYNKEREDAAQGIWFDNAFSLCELSNINPPRKQKILPLLVGAILSEDFINNKDKWAKFKNFWNTHKIGRTSLKSKCKEIEEARKNSGNAFKIDYEEALNHPEHSNNKALIKIIQTIPDIIQAIQSHLGHNDSQALIYHNPFSLSQLYTILETKRDGFHKNCVAVTCENYWRSQKTEIDPEISYASRLPADSVRPFDGVLARMMQRLAYEIAMAKWEQIKHIPDNSSLLIPIYLEQNRFEFEESFKKIKGGSSDKTLEQAIEKQNIQWEEKFQRIINASMNICPYKGASIGGQGEIDHIYPRSLSKKHFGVIFNSEANLIYCSSQGNREKKEEHYLLEHLSPLYLKHQFGTDNVSDIKNFISQNVANIKKYISFHLLTPEQQKAARHALFLDYDDEAFKTITKFLMSQQKARVNGTQKFLGKQIMEFLSTLADSKQLQLEFSIKQITAEEVHDHRELLSKQEPKLVKSRQQSFPSHAIDATLTMSIGLKEFPQFSQELDNSWFINHLMPDEVHLNPVRSKEKYNKPNISSTPLFKDSLYAERFIPVWVKGETFAIGFSEKDLFEIKPSNKEKLFTLLKTYSTKNPGESLQELQAKSKAKWLYFPINKTLALEFLHHYFHKEIVTPDDTTVCHFINSLRYYTKKESITVKILKEPMPVLSVKFESSKKNVLGSFKHTIALPATKDWERLFNHPNFLALKANPAPNPKEFNEFIRKYFLSDNNPNSDIPNNGHNIKPQKHKAVRKVFSLPVIPGNAGTMMRIRRKDNKGQPLYQLQTIDDTPSMGIQINEDRLVKQEVLMDAYKTRNLSTIDGINNSEGQAYATFDNWLTLPVSTFKPEIIKLEMKPHSKTRRYIRITQSLADFIKTIDEALMIKPSDSIDDPLNMPNEIVCKNKLFGNELKPRDGKMKIVSTGKIVTYEFESDSTPQWIQTLYVTQLKKQP

SEQ ID NO: 520 - protein, 907 aa, Leptospira inadai
MAKSIEEIRSIQNEFVVEYSILLKKIKKGEIDKKNDVYKVYQNTIKSSERLEQVLKERLGFQNVSKSYFNNPYSIAQLYNLISVDRSGFSKVCRSCQEENHWRSTLIDTDRGPQAQASKQVSDTGRPFDGQLAMLLDRIAFEIVKLKRIEIERLLSNKNSSKIEVVEIPLLIEENSFNFRYELAELKKLSKKKKDQLKKSVEEFDTKLNSKQERIKAASRELCPYTGKKISKGEIDHILPRSWTQKQFGTALNAEANLIYASREGNQSKGNREYGLNDLDEKYLNIIFGTKEVDSIQRNISDTIDRLDIERGTTRIVFDRLAPNERDCLRHALFIKSLRPKVFELLSGQLKARVNGTQLYLAKRIRSLLLKNQDFITKSLIIKVPSFSFYEPRTVDLPYMRKELAEKFPNLGKQNPQPTGSHIIDAAMVMAYAVETDSGNLSFGSKDKSEGFDSESLSRFLPSNIQFLSIKSKDKTDSKYPYKKPLFKDGVFGERFLPILIAEKGLRVGYTLENSLEVNSENPEEFFNVLKPYLLFKRKPIESNYQTLVAFAQKDKRGYIVLPVNKPKALESISQRKSDPHTSILKNILYTVSRESIPSLIFDKNTLIPEIKSNKVNWGDKLEKKFRIKIEIKLYGKKIADGFIRYPGKTEWEKLLLTEPLKGLVKNKTLTPKWFDSLENLAGLDDHFKDTSNPEAKHKRKSNHYALPVPKGPSGGFRIRRNSFDGYKVYQLYSVDGNSFHAFKIENGWTGKTLLLDIYQNSGNLHSLDYDYENTDISQTALFSKFYKIEFSKEETQKINSKGIKSLYVAPGSSSRQYIRVIFDKQTFSKFIKFQSKFWEFDLITPLPKDKAKDLIESILKIFPEDLRPKKPRNDIHIQNISHDSVQVEYIADGKTQGFGQYFINQN

SEQ ID NO: 521 - protein, 418 aa, Leptospira inadai
MILKSPIAIDLGAKNTGIVYTTYQPNALPTEIHGATIISDNLKLSQVDRRAKRHQRRNYTRMKLARRLVYLIIRYHYRIPEQDLTPEVKTSLQSLLTRRGYTFQSIETEGNELGQAPWGEIEDYFPNVQDYEKSLPIQTVLYHFFSSENLELNKLVPSKEPETKEDKNILKYIREQKEAFESEQNNGARHRLKYFEEIKEDFPRKIKLMECLQKNKIEEKKFLNLIQNISNLQIKPLRAYFNDKDMKEKEIWEPRRLHTYIARWIRSWHIDPKNSSKRLIRQKLLSQLENGKLKIIRDTSIYSPSKDIISFLEEIDPKDTIPPYEDQNNRHPPRCQNLWLDGKILDRYFPGWEQSLWKLIRNEKNNPFEQLITKDFRTDDTISEGKSLSEQIQIYERSHSNIKLDVRAVILQRFLDRS

SEQ ID NO: 522 - protein, 125 aa, Leptospira inadai
MSAYDRSANLDPWSLRLQGKAKKEIKTTESLSKTDLQKASDAYEKIKEILSESDTDQFIKLANRYYLEVADIKKGMWLPTAPERKHKEIPKSIAHEENQDISLFHKCNTKTGSKKRISQVSLEMF

SEQ ID NO: 523 - protein, 1355 aa, Leuconostoc gelidum
MTYSIGLDIGTGSVGWAVIGDDYRLKRAKGKNLIGVRLFDSATTAAERRGYRTTRRRLSRRHWRLRLLNDIFASDLAEQDENFLPRLKYSWVNPDDEQNPQLNSDVANGALFGSSETDKAFHKNYPTIYHLRHELMTDTAKHDLREVYLAIHHIVKYRGNFLNTADKINAENSFNVDLFIAALDEYNEFLETPITSIKDAQLFSDKLTDINARNKSVRVENAMSETYDDKSKIFKAILTALVGNTANFQTIFDLSDLEKDEAKNFKFKLDLEDVETKLDVVRAKLSDEQNAFLEAVLIAYDGITLKMILGDYKSISQSMIESYKSHQRDWKYIKNNVRLNEQKIEPDKNSVKFFKLDPKKLIYPSNLAYLQVISSNEDEHRKGLDYFKTAIQDADILQRIENDTFLPRQRTKRNGVLPYQLHLAELEQIIKKQSKYYPFLANIYTQDNKTENKLIGLLKFRVPYYVGPLVEAEKVTGDGKNHWLIKKELQENTPITPFNFDDVVDKDKSGEQFIKRITGTDSYLIGEPTLPENSLLYQKYNVLQELNNVRNERHQRLPIKVKQDIFEHVFKIDKNVNAKKVMAYLKLNGYGDFQIAGLSDTRTGKFNSNLSSYNYFVDLLGREKTEKIREDRLEEIIEIQTVFEDKILVAKRLSNLDFLTPQEKSKLSAKHYTGWGRLSQKLLTTQFIKTALSEAGDIIPQSHSIIDLLYYTDKNLMEILNDKTFNVRNWLTEQNKGTESGNSLYDQIDALAGPKDIKRGITQVFSIIDDIKKAMGSNPETVYLEFARETQTSRLTNSRLNRVQEIYNSPELKTEFAYLAKKLEAETKESIHDDRLYLYYLQEGRDMYTGKEIPFDQISSNYDIDHIIPQAFTKDDSLDNRVLVNRATNARKSNSPTFTNDIIDNRKSWWQSLVKRGLMSKEKFERLTDKRKTFSENQTNHFIARQLVETRQIIKNVADLIKNNYDGTQAVAIRASLTGEMRRYLDWPKNRDMNDYHHAHDALMMATVGKYVDRRGFFDNGSVSDGAGNAYNLYTKDWLVAARVGTRNDSQRVNPYGFIVGSMNSKAVRQQVNKETGEIVWGNENLDYLRHVLSYKKILVTRRLSGSSGRLYAETLFSPNPKAKLIAQKANRSVALYGGFTKAESAYTALVEFNKKGDRSYKLIKVPMAIANRVNDKQITVTAYIASLNLRDFSRVVLEHLPLGTLIRESDGSEFYAASSEYKHNAKELWAPKEILRSSKKLDKATADNLIDIFDFLTNDKTISNFKFYEKDLLHLKNVRDKFVEASDEIKIKVLSDVIYELHNDAGWRDPFKHIQEKPAWTMLQVKGGIKLSEKAAIVYQSPTGLFETITIVGE

SEQ ID NO: 524 - protein, 883 aa, Leuconostoc pseudomesenteroides
MIGVRLFEGADTAAERRGYRTTRRRLSRRRWRLRLLNDIFASELSKIDENFLPRLKYSWVNKNDTDNVHFGVGVFDNSEQEKAFYQDYPTIYHLRQKLMTDNRQHDLREVYLAIHHIVKYRGHFLNSGEISANSSFDAQKFLELLREFDNTFYPDAVKFLNLDQLDLPDKISSEISDSKISKSERVDRVLQHVQLANSGAKKILKAILNAVVGNSVDSVAMFSLSDLDKEEKKKINHPVTDSKPFKYSDKEVEAKLDELSNLLQDEQKIEFLSLLKLSFDGLTLKMLLGNAKSVSEAMVERYKVHKDDLKFIKENILNSFSKDKKKEFDKYYEAHLAEKDVDNVDKYFKKIIDDSIISKDKKIELLQKIDDHDFLPSQRSKINGAIPHQLHRNELDKIISQQSKYYPFLADSYTQNGKTETKLAGLVNFRVPYYVGPLVSKENADRNNPDGGQNHWVEFKENTSLSNLTPWNFNEIVDKDKSAAKFIERLTGMDTYLIGEPTLPQNSLLYQKYNVLQELNNIRVDNHKLDVKIKQDVFEHLFKTQNSVSAKDVKNYLIANGYAAPSIQITGLSDTNEKTFNSKLSSYNYLVDKLGRTFVESVKSDVLEKIIELQTVFEDKTVLLRQLSMISELTLAQANQLAEKHWTGWGRLSRKLLSSKVVDVNKITNSTFYPATSRQTIIDTLYHTQLNLMEIINNAEDLYGVRQWISEQNKSDSSDTNDVYDQIQELAGDKKIKRGITQSFRILDDIVKAMGGEPERVYLEFARENQQSGVSFSRKNLLSKLYENDSLKQTFKELKSQLESETKENLQNDRLYLYYLQQGRDMYSNDELNIDQLSSYDIDHIIPQAYTKDNSFDNRVLVSSKANRLKRMLLWYPVKLSKK

SEQ ID NO: 525 - protein, 468 aa, Leuconostoc pseudomesenteroides
MKDQGFISKRKFENLTRRGDFSEQQKERFIARALVETRQIIVNVSSLIDSHFNHTKAVAVKSNMTTDMRHYTKVPKNRDINDYHHAHDALFVATVGQYIENKGFMKAGKLSDSVGNEYNRYTKKWIETARKNTNYGRVNPFGFVVGSMQTATRGKLDYETGELKVVKNNYWSKDDLDYLLKVVSYKKILVTTKLQDNKGAMYDANLISAKGSGKKKAQLQISKSKNIDLYGGFNKLQNEYSVLILNHDEYRWLSIPMYARNSSEQYLHDKYPDAKVILNHILVGQPILLSNSSDPQKSKFASLRIATGGDYHNNFEFVPSVDVKKILDNIYLNHSVTDDEYKKVFESLLATLHDKFVFGIHQVMYNKIFDNKYLFDKMPDEAKRNVINSLLKFMNISKNQLGAVGKIGGKVNGVLYGFKTETEKGTSAGQLISNGKMQPHDIFIFQSPTGIFERRVTVAELANVIKDE

SEQ ID NO: 526 - protein, 1103 aa, Listeria innocua
LKLYPGEKSTGMFAQFISLIVGSKGNFQKPFDLIEKSDIECAKDSYEEDLESLLALIGDEYAELFVAAKNAYSAVVLSSIITVAETETNAKLSASMIERFDTHEEDLGELKAFIKLHLPKHYEEIFSNTEKHGYAGYIDGKTKQADFYKYMKTTLENIEGADYFIAKIEKENFLRKQRTFDNGAIPHQLHLEELEAILHQQAKYYPFLKENYDKIKSLVTFRIPYFVGPLANGQSEFAWLTRKADGEIRPWNIEEKVDFGKSAVDFIEKMTNKDTYLPKENVLPKHSLCYQKYLVYNELTKVRYINDQGKTSYFSGQEKEQIFNDLFKQKRKVKKKDLELFLRNMSHVESPTIEGLEDSFNSSYSTYHDLLKVGIKQEILDNPVNTEMLENIVKILTVFEDKRMIKEQLQQFSDVLDGVVLKKLERRHYTGWGRLSAKLLMGIRDKQSHLTILDYLMNDDGLNRNLMQLINDSNLSFKSIIEKEQVTTADKDIQSIVADLAGSPAIKKGILQSLKIVDELVSVMGYPPQTIVVEMARENQTTGKGKNNSRPRYKSLEKAIKEFGSQILKEHPTDNQELKNNRLYLYYLQNGKDMYTGQDLDIHNLSNYDIDHIVPQSFITDNSIDNLVLTSSAGNREKGNDVPPLEIVQKRKVFWEKLYQGNLMSKRKFDYLTKAERGGLTEADKARFIHRQLVETRQITKNVANILHQRFNYGKDDHGNTMKQVRIVTLKSALVSQFRKQFQLYKVRGVNDYHHAHDAYLNGVVANTLLKVYPQLEPEFVYGDYHQFDWFKANKATAKKQFYTNIMLFFAQKDRIIDENGEILWDKKYLDTVKKVMSYRQMNIVKKTEIQKGEFSKATIKPKGNSSKLIPRKTNWDPMKYGGLDSPNMAYAVVIEYAKGKNKLVFEKKIIRVTIMERKAFEKDEKAFLEEQGYRQPKVLAKLPKYTLYECEEGRRRMLASANEAQKGNQQVLPNHLVTLLHHAANCEVSDGKSLDYIESNREMFAELLAHVSEFAKRYTLAEANLNKINQLFEQNKEGDIKAIAQSFVDLMAFNAMGAPASFKFFETTIERKRYNNLKELLNSTIIYQSITGLYESRKRLDD

SEQ ID NO: 527 - protein, 1337 aa, Listeria innocua
MKNMKKPYTIGLDIGTNSVGWAVLTDQYDLVKRKMKIAGDSEKKQIKKNFWGVRLFDEGQTAADRRMARTARRRIERRRNRISYLQGIFAEEMSKTDANFFCRLSDSFYVDNEKRNSRHPFFATIEEEVEYHKNYPTIYHLREELVNSSEKADLRLVYLALAHIIKYRGNFLIEGALDTQNTSVDGIYKQFIQTYNQVFASGIEDGSLKKLEDNKDVAKILVEKVTRKEKLERILKLYPGEKSAGMFAQFISLIVGSKGNFQKPFDLIEKSDIECAKDSYEEDLESLLALIGDEYAELFVAAKNAYSAVVLSSIITVAETETNAKLSASMIERFDTHEEDLGELKAFIKLHLPKHYEEIFSNTEKHGYAGYIDGKTKQADFYKYMKMTLENIEGADYFIAKIEKENFLRKQRTFDNGAIPHQLHLEELEAILHQQAKYYPFLKENYDKIKSLVTFRIPYFVGPLANGQSEFAWLTRKADGEIRPWNIEEKVDFGKSAVDFIEKMTNKDTYLPKENVLPKHSLCYQKYLVYNELTKVRYINDQGKTSYFSGQEKEQIFNDLFKQKRKVKKKDLELFLRNMSHVESPTIEGLEDSFNSSYSTYHDLLKVGIKQEILDNPVNTEMLENIVKILTVFEDKRMIKEQLQQFSDVLDGVVLKKLERRHYTGWGRLSAKLLMGIRDKQSHLTILDYLMNDDGLNRNLMQLINDSNLSFKSIIEKEQVTTADKDIQSIVADLAGSPAIKKGILQSLKIVDELVSVMGYPPQTIVVEMARENQTTGKGKNNSRPRYKSLEKAIKEFGSQILKEHPTDNQELRNNRLYLYYLQNGKDMYTGQDLDIHNLSNYDIDHIVPQSFITDNSIDNLVLTSSAGNREKGDDVPPLEIVRKRKVFWEKLYQGNLMSKRKFDYLTKAERGGLTEADKARFIHRQLVETRQITKNVANILHQRFNYEKDDHGNTMKQVRIVTLKSALVSQFRKQFQLYKVRDVNDYHHAHDAYLNGVVANTLLKVYPQLEPEFVYGDYHQFDWFKANKATAKKQFYTNIMLFFAQKDRIIDENGEILWDKKYLDTVKKVMSYRQMNIVKKTEIQKGEFSKATIKPKGNSSKLISRKTNWDPMKYGGLDSPNMAYAVVIEYAKGKNKLVFEKKIIRVTIMERKAFEKDEKAFLEEQGYRQPKVLAKLPKYTLYECEEGRRRMLASANEAQKGNQQVLPNHLVTLLHHVANCEVSDGKSLDYIESNREMFAELLAHVSEFAKRYTLAEANLNKINQLFEQNKEGDIKAIAQSFVDLMAFNAMGAPASFKFFETTIERKRYNNLKELLNSTIIYQSITGLYESRKRLDD

SEQ ID NO: 528 - protein, 953 aa, Listeria ivanovii
MKKMLANIDGADYFIDQIEEENFLRKQRTFDNGTIPHQLHLEELEAILHQQAKYYPFLRKDYEKIRSLVTFRIPYFIGPLANGQSDFAWLTRKADGEIRPWNIEEKVDFGKSAIDFIEKMTNKDTYLPKENVLPKHSLCYQKYMVYNELTKIRYIDDQGKTHHFSGQEKQQIFNGLFKQQRKVKKKDLERFLYTINHIESPTIEGVEDAFNSSFATYHDLQKGGVTQEILDNPLNADMLEEIVKILTVFEDKRMIKEQLQSFSDVLDGTILKKLERRHYTGWGRLSAKLLTGIRDKHSHLTILDYLMNDDGLNRNLMQLINDSNLSFKSIIEKEQVSTADKGIQSIVAELAGSPAIKKGILQSLKIVDELVGIMGYPPQTIVVEMARENQTTGKGKNNSKPRFISLEKAIKEFGSQILKEHPTDNQCLKNDRLYLYYLQNGKDMYTGKELDIHNLSNYDIDHIIPQSFITDNSIDNRVLVSSTANREKGDNVPLLEVVRKRKAFWEKLYQAKLMSKRKFDYLTKAERGGLTEADKANFIQRQLVETRQITKNVANILYQRFNCKQDENGNEVEQVRIVTLKSTLVSQFRKQFQLYKVREVNDYHHAHDAYLNGVVANTLLKVYPQLEPEFVYGDYHQFDWFKANKATAKKQFYTNIMRFFAKENQIIDKNGEILWDNRYLDTIKKVLSYRQMNIVKKTEIQKGEFSNATVNPKGNSSKLISRKADWNPIKYGGFDGSNMAYSIVIEYEKRKKKTVIKKELIQINIMERVAFEKDQKAFLEEKGYYSPKVLTKIPKYTLYECENGRRRMLGSANEAQKGNQMVLPNHLMTLLYHAKNCEANDGESLAYIEMHREMFAELLAYISEFAKRYTLANDRLEKINMFFEQNKKGDIKVIAKSFDKLKVFNAFGAPRDFEFFETTIKRKRYYNIKELLNATIIYQSITGLYEARKRLED

SEQ ID NO: 529 - protein, 232 aa, Listeria ivanovii
MMSKLILGLDIGISSVGWGVLDESTNEVVDAGVRLFEEATRNGNEDRRGFRSARRLKRRRQHRLERAKGLIENNGFSCTDINKFNPYQARYNAIFGEVTKDELAAALFHLVKRRGTTIDAPEEEVKDVENELSTKMQLEKNAKKLATKYDYICEIQLEKLKENKVVRDHENRFRTEDYVKEARAILENQQEYYPEVTNEFIESYMALIETRRMYYDGPGSEKSPTPYGQYFI

SEQ ID NO: 530 - protein, 300 aa, Listeria monocytogenes
DDGLNRNLMQLINDSNLSFKSIIEKEQVSTTDKDLQSIVADLAGSPAIKKGILQSLKIVDELVSIMGYPPQTIVVEMARENQTTVKGKNNSRPRYKSLEKAIKEFGSQILKEHPTDNQELRNNRLYLYYLQNGKDMYTGQELDIHNLSNYDIDHIVPQSFITDNSIDNLVLTSSAGNREKGDDVPPLEIVRKRKVFWEKLFQGNLMSKRKFDYLTKAERGGLTEADKATFIHRQLVETRQITKNVANILHQRFNNETDNHGNNMEQVRIVMLKSALVSQFRKQFQLYKVREVNDYHHAHD

SEQ ID NO: 531 - protein, 782 aa, Listeria monocytogenes
  misc_feature (722)..(722): Xaa can be any naturally occurring amino acid
IFNDLFKQKRKVKKKDLELFLRNINQIESPTIEGLEDSFNASYATYHDLLKVGMKQEILDNPLNTEMLEDIVKILTVFEDKRMIKEQLQQFSDVLDGVVLKKLERRHYTGWGRLSAKLLVGIRDKQSHLTILEYLMNDDGLNRNLMQLINDSNLSFKSIIEKEQVSTTDKDLQSIVADLAGSPAIKKGILQSLKIVDELVSIMGYPPQTIVVEMARENQTTVKGKNNSRPRYKSLEKAIKEFGSQILKEHPTDNQELKNNRLYLYYLQNGKDIYTGQELDIHNLSNYDIDHIVPQSFITDNSIDNLVLTSSAGNREKGDDVPPLEIVRKRKVFWEKLYQGNLMSKRKFDYLTKAERGGLTEADKARFIHRQLVETRQITKNVANILHQRFNNETDNHGNTMEQVRIVTLKSALVSQFRKQFQLYKVREVNDYHHAHDAYLNGVVANTLLKVYPQLEPEFVYGEYHQFDWFKANKATAKKQFYTNIMLFFAQKERIIDENGEILWDKKYLETIKKVLDYRQMNIVKKTEIQKGEFSKATIKPKGNSSKLIPRKENWDPMKYGGLDSPNMAYAVIIEHAKGKKKIVIEKKLIQINIMERKMFEKDEEAFLEEKGYRHPKVLTKLPKYTLYECEKGRRRMLASANEAQKGNQLVLSNHLVSLLYHAKNCEASDGKSLKYTEAHRETFSELLAQVSEFATRYTLADANLSKINNLFEQNKEGDIKXIAQSFVDLMVFNAMGAPASFKFFEATIDRKRYTNLKELLSSTIIYQSITGLYESRKRLDD

SEQ ID NO: 532 - protein, 1334 aa, Listeria monocytogenes; identical to SEQ ID NO: 114

SEQ ID NO: 533 - protein, 1334 aa, Listeria monocytogenes
MKNPYTIGLDIGTNSVGWAVLTDQYDLVKRKMKVAGNSDKKQIKKNFWGVRLFDDGQTAVDRRMNRTARRRIERRRNRISYLQEIFAVEMANIDANFFCRLNDSFYVDSEKRNSRHPFFATIEEEVAYHKNYRTIYHLREELVNSSEKADLRLVYLALAHIIKYRGNFLIEGALDTKNTSVDEVYKQFIQTYNQVFMSNIEEGALAKVEENTEVASILAGKFTRREKFERILRLYPGEKSTGMFAQFISLIVGNKGNFQKVFNLVEKTDIECAKDSYEEDLEALLAIIGDEYAELFVAAKNTYNAVVLSSIITVTATETNAKLSASMIERFDAHEKELGELKAFIKLHLPKQYQEIFNNAEIDGYAGYIDGKTKQVDFYKYLKTTLENVEGADYFITKIEEENFLRKQRTFDNGVIPHQLHLEELEAILHQQAKYYPFLREGYDKIKSLVTFRIPYFVGPLANGQSEFAWLTRKDDGEIRPWNIEEKVDFGKSAVDFIEKMTNKDTYLPKENVLPKHSLCYQKYMVYNELTKIRYIDDQGKTNYFSGREKQQIFNDLFKQKRKVKKKDLELFLRNINHIESPTIEGLEDSFNASYATYHDLLKVGLKQEILDNPLNTEILEDIVKILTVFEDKRMIKEQLEQFSDVLDGVVLKKLERRHYTGWGRLSAKLLVGIRDKQSHLTILDYLMNDDGLNRNLMQLINDSNLSFKSIIEKEQVSTTDKDLQSIVADLAGSPAIKKGILQSLKIVDELVSIMGYPPQTIVVEMARENQTTGKGKNNSKPRYKSLEKAIKDFGSQILKEHPTDNQELKNNRLYLYYLQNGKDIYTGQELDIHNLSNYDIDHIVPQSFITDNSIDNLVLTSSAGNREKGGDVPPLEIVRKRKVFWEKLYQGNLMSKRKFDYLTKAERGGLTEADKARFIHRQLVETRQITKNVANILHQRFNKETDNHGNTMEQVRIVTLKSALVSQFRKQFQLYKVREVNDYHHAHDAYLNGVVANTLLKVYPQLEPEFVYGEYHQFDWFKANKATAKKQFYTNIMLFFAQKERIIDENGEILWDKKYLETIKKVLDYRQINIVKKTEIQKGEFSKATIKPKGNSSKLIPRKENWDPMKYGGLDSPNMAYAVIIEHAKGKKKIVIEKKLIQINIMERKMFEKDEEAFLEEKGYHQPKVLTKLPKYTLYECEKGRRRMLSSANEAQKGNQLVLSNHLVSLLYHAKNCEASDGKSLKYIEAHRETFSELLAQVSEFATKYTLADANLSKINNLFEQNKEGDIKAIAQSFVDLMAFNAMGAPASFKFFEATIDRKRYTNLKELLSSTIIYQSITGLYESRKRLDD

SEQ ID NO: 534 - protein, 1334 aa, Listeria monocytogenes
MKNPYTIGLDIGTNSVGWAVLTDQYDLVKRKMKVAGNSDKKQIKKNFWGVRLFDDGQTAVDRRMNRTARRRIERRRNRISYLQEIFAVEMANIDANFFCRLNDSFYVDSEKRNSRHPFFATIEEEVAYHKNYRTIYHLREELVNSSEKADLRLVYLALAHIIKYRGNFLIEGALDTKNTSVDEVYKQFIQTYNQVFMSNIEEGALAKVEENTEVASILAGKFTRREKFERILRLYPGEKSTGMFAQFISLIVGNKGNFQKVFNLVEKTDIECAKDSYEEDLEALLAIIGDEYAELFVAAKNTYNAVVLSSIITVTATETNAKLSASMIERFDAHEKELGELKAFIKLHLPKQYQEIFNNAEIDGYAGYIDGKTKQVDFYKYLKTTLENVEGADYFITKIEEENFLRKQRTFDNGVIPHQLHLEELEAILHQQAKYYPFLREGYDKIKSLVTFRIPYFVGPLANGQSEFAWLTRKDDGEIRPWNIEEKVDFGKSAVDFIEKMTNKDTYLPKENVLPKHSLCYQKYMVYNELTKIRYIDDQGKTNYFSGREKQQIFNDLFKQKRKVKKKDLELFLRNINHIESPTIEGLEDSFNASYATYHDLLKVGLKQEILDNPLNTEILEDIVKILTVFEDKRMIKEQLEQFSDVLDGVVLKKLERRHYTGWGRLSAKLLVGIRDKQSHLTILDYLMNDDGLNRNLMQLINDSNLSFKSIIEKEQVSTTDKDLQSIVADLAGSPAIKKGILQSLKIVDELVSIMGYPPQTIVVEMARENQTTGKGKNNSKPRYKSLEKAIKDFGSQILKEHPTDNQELKNNRLYLYYLQNGKDIYTGQELDIHNLSNYDIDHIVPQSFITDNSIDNLVLTSSAGNREKGGDVPPLEIVRKRKVFWEKLYQGNLMSKRKFDYLTKAERGGLTEADKARFIHRQLVETRQITKNVANILHQRFNKETDNHGNTMEQVRIVTLKSALVSQFRKQFQLYKVREVNDYHHAHDAYLNGVVANTLLKVYPQLEPEFVYGEYHQFDWFKANKATAKKQFYTNIMLFFAQKERIIDENGEILWDKKYLETIKKVLDYRQINIVKKTEIQKGEFSKATIKPKGNSSKLIPRKENWDPVKYGGLDSPNMAYAVIIEHAKGKKKIVIEKKLIQINIMERKMFEKDEEAFLEEKGYHQPKVLTKLPKYTLYECEKGRRRMLSSANEAQKGNQLVLSNHLVSLLYHAKNCEASDGKSLKYIEAHRETFSELLAQVSEFATKYTLADANLSKINNLFEQNKEGDIKAIAQSFVDLMAFNAMGAPASFKFFEATIDRKRYTNLKELLSSTIIYQSITGLYESRKRLDD

SEQ ID NO: 535 - protein, 1099 aa, Listeria monocytogenes
MKNPYTIGLDIGTNSVGWAVLTDQYDLVKRKMKVAGNSDKKQIKKNFWGVRLFDDGQTAVDRRMNRTARRRIERRRNRISYLQEIFAVEMANIDANFFCRLNDSFYVDSEKRNSRHPFFATIEEEVAYHKNYRTIYHLREELVNSSEKADLRLVYLALAHIIKYRGNFLIEGALDTKNTSVDEVYKQFIQTYNQVFMSNIEEGALAKVEENTEVASILAGKFTRREKFERILRLYPGEKSTGMFAQFISLIVGNKGNFQKVFNLVEKTDIECAKDSYEEDLEALLAIIGDEYAELFVAAKNTYNAVVLSSIITVTATETNAKLSASMIERFDAHEKELGELKAFIKLHLPKQYQEIFNNAEIDGYAGYIDGKTKQVDFYKYLKTTLENVEGADYFITKIEEENFLRKQRTFDNGVIPHQLHLEELEAILHQQAKYYPFLREGYDKIKSLVTFRIPYFVGPLANGQSEFAWLTRKDDGEIRPWNIEEKVDFGKSAVDFIEKMTNKDTYLPKENVLPKHSLCYQKYMVYNELTKIRYIDDQGKTNYFSGREKQQIFNDLFKQKRKVKKKDLELFLRNINHIESPTIEGLEDSFNASYATYHDLLKVGLKQEILDNPLNTEILEDIVKILTVFEDKRMIKEQLEQFSDVLDGVVLKKLERRHYTGWGRLSAKLLVGIRDKQSHLTILDYLMNDDGLNRNLMQLINDSNLSFKSIIEKEQVSTTDKDLQSIVADLAGSPAIKKGILQSLKIVDELVSIMGYPPQTIVVEMARENQTTGKGKNNSKPRYKSLEKAIKDFGSQILKEHPTDNQELKNNRLYLYYLQNGKDIYTGQELDIHNLSNYDIDHIVPQSFITDNSIDNLVLTSSAGNREKGGDVPPLEIVRKRKVFWEKLYQGNLMSKRKFDYLTKAERGGLTEADKARFIHRQLVETRQITKNVANILHQRFNKETDNHGNTMEQVRIVTLKSALVSQFRKQFQLYKVREVNDYHHAHDAYLNGVVANTLLKVYPQLEPEFVYGEYHQFDWFKANKATAKKQFYTNIMLFFAQKERIIDENGEILWDKKYLETIKKVLDYRQINIVKKTEIQKGEFSKATIKPKGIPAN

SEQ ID NO: 536 - protein, 1334 aa, Listeria monocytogenes
MKNPYTIGLDIGTNSVGWAVLTDQYDLVKRKMKVAGNSDKKQIKKNFWGVRLFDEGETAADRRMNRTARRRIERRRNRISYLQEIFALEMANIDANFFCRLNDSFYVDSEKRNSRHPFFATIEEEVAYHKNYRTIYHLREELVNSSEKADLRLVYLALAHIIKYRGNFLIEGALDTKNTSVDGVYKQFIQTYNQVFISNIEEGTLAKMEENTTVADILAGKFTRKEKLERILQLYPGEKSTGMFAQFISLIVGSKGNFQKVFDLVEKTDIECAKDSYEEDLEALLAIIGDEYAELFVAAKNTYNAVVLSSIITVTDTETNAKLSASMIERFDAHEKDLSELKAFIKLHLPKQYEEIFSNVAIDGYAGYIDGKTKQVDFYKYLKTLLENIEGADYFIAKIEEENFLRKQRTFDNGAIPHQLHLEELEAILHQQAKYYPFLKEAYDKIKSLVTFRIPYFVGPLANGQSDFAWLTRKADGEIRPWNIEEKVDFGKSAVDFIEKMTNKDTYLPKENVLPKHSLYYQKYMVYNELTKVRYIDDQGKTNYFSGQEKQQIFNDYFKQKRKVSKKDLEQFLRNMSHIESPTIEGLEDSFNSSYATYHDLLKVGIKQEVLENPLNTEMLEDIVKILTVFEDKRMIKEQLQQFSDVLDGAVLKKLERRHYTGWGRLSAKLLVGIRDKQSHLTILDYLMNDDGLNRNLMQLINDSNLSFKSIIEKEQVSTTDKDLQSIVADLAGSPAIKKGILQSLKIVDELVSIMGYPPQTIVVEMARENQTTVKGKNNSRPRYKSLEKAIKEFGSQILKEHPTDNQELRNNRLYLYYLQNGKDMYTGQELDIHNLSNYDIDHIVPQSFITDNSIDNLVLTSSAGNREKGDDVPPLEIVRKRKVFWEKLFQGNLMSKRKFDYLTKAERGGLTEADKATFIHRQLVETRQITKNVANILHQRFNNETDNHGNNMEQVRIVMLKSALVSQFRKQFQLYKVREVNDYHHAHDAYLNGVVANTLLKVYPQLEPEFVYGEYHQFDWFKANKATAKKQFYTNIMLFFAQKERIIDENGEILWDKKYLETIKKVLDYRQMNIVKKTEIQKGEFSKATIKPKGNSSKLIPRKENWDPMKYGGLDSPNMAYAVIIEHAKGKKKVVFEKKIIRITIMERKAFEKDEKSFLEKQGYRQPKVLTKLPKYTLYECENGRRRMLASANEAQKGNQQVLKGQLITLLHHAKNCEASDGKSLDYIESNREMFGELLAHVSEFAKRYTLADANLSKINQLFEQNKDNDIKVIAQSFVNLMAFNAMGAPASFKFFEATIERKRYTNLKELLSATIIYQSITGLYEARKRLDG

SEQ ID NO: 537 - protein, 1334 aa, Listeria monocytogenes
MKNPYTIGLDIGTNSVGWAVLTNQYDLVKRKMKVAGNSDKKQIKKNFWGVRLFDDGQTAVDRRMNRTARRRIERRRNRISYLQEIFAVEMANIDANFFCRLNDSFYVDSEKRNSRHPFFATIEEEVAYHKNYRTIYHLREELVNSSEKADLRLVYLALAHIIKYRGNFLIEGALDTKNTSVDGVYEQFIQTYNQVFMSNIEEGTLAKVEENIEVANILAGKFTRREKFERILQLYPGEKSTGMFAQFISLIVGSKGNFQKVFDLIEKTDIECAKDSYEEDLEALLAIIGDEYAELFVAAKNTYNAVVLSSIITVTATETNAKLSASMIERFDAHEKDLGELKAFIKLHLPKQYQEIFNNAAIDGYAGYIDGKTKQVDFYKYLKTILENIEGADYFIAKIEEENFLRKQRTFDNGAIPHQLHLEELEAIIHQQAKYYPFLREDYEKIKSLVTFRIPYFVGPLAKGQSEFAWLTRKADGEIRPWNIEEKVDFGKSAVDFIEKMTNKDTYLPKENVLPKHSLCYQKYMVYNELTKVRYIDDQGKTNYFSGQEKQQIFNDLFKQKRKVKKKDLELFLRNINHIESPTIEGLEDSFNASYATYHDLLKVGMKQEILDNPLNTEMLEDIVKILTVFEDKPMIKEQLQQFSDVLDGGVLKKLERRHYTGWGRLSAKLLVGIREKQSHLTILDYLMNDDGLNRNLMQLINDSNLSFKSIIEKEQVSTTDKDLQSIVADLAGSPAIKKGILQSLKIVDELVSIMGYPPQTIVVEMARENQTTGKGKNNSKPRYKSLEKAIKEFGSKILKEHPTDNQELKNNRLYLYYLQNGKDMYTGQELDIHNLSNYDIDHIVPQSFITDNSIDNLVLTSSAGNREKGGDVPPLEIVRKRKVFWEKLYQGNLMSKRKFDYLTKAERGGLTDADKARFIHRQLVETRQITKNVANILHQRFNNETDNHGNTMEQVRIVTLKSALVSQFRKQFQLYKVREVNDYHHAHDAYLNGVVANTLLKVYPQLEPEFVYGEYHQFDWFKANKATAKKQFYTNIMLFFGQKERIIDENGEILWDKKYLETIKKVLDYRQMNIVKKTEIQKGEFSKATIKPKGNSSKLIPRKENWDPMKYGGLDSPNMAYAVIIEHAKGKKKLIFEKKIIRITIMERKMFEKDEEAFLEEKGYRHPKVLTKLPKYTLYECEKGRRRMLASANEAQKGNQLVLSNHLVSLLYHAKNCEASDGKSLKYIEAHRETFSELLAQVSEFATRYTLADANLSKINNLFEQNKEGDIQAIAQSFVDLMAFNAMGAPASFKFFEATIDRKRYTNLKELLSSTIIYQSITGLYESRKRLDD

SEQ ID NO: 538 - protein, 874 aa, Listeria seeligeri; identical to SEQ ID NO: 180

SEQ ID NO: 539 - protein, 1087 aa, Listeriaceae bacterium
MKKLVLGLDIGVASVGWGIIDAENGDVVDTGVRLFSSRDASENESRRTSRQSRRLSRRKKHRRERIKQLLLAHDMDICDIVNENPYELRVKGLNEKLEVSEIYVALTHLAKRRGVSYLDDVVEEGGTIKSEHLNKNMEEIKSGKMPCEIQLERFEKYGQVRGMIEINQDTEESSFLVNIFRTSDYIKEAKTILATQQKFHKQITNEFIDEYIHIMASKRDYFIGPGNEKSRTDYGVYRTNGDTWDNLFEILIGKCSVFPEETRAARSSYVAQEFNLLNDLNNLKISNLESGKLSASQKHDIVEKVKNSKKFGTKDLLKYIASVCECKIEDIGGCRVDKNRKPIMHTFENYRKVHNALNEAGVDLRLSETDYDELMKIMTLNSETLEIKKQCKEKLPQLTEDYLNVCLVLNKKGAFSGWHALSLKAMKLMMPELYGTSKNQMQIIHTMQLGKAYLKPLNQQKYLNSEAILEEIYNPIAARSIRQTIKVTNAILKKYGHLDSVIIEMPRDYQTSEDERKMIEKMQKENEKEKKAALKRAREEYPFPDEAFRNHKELATKLRLWYQQDQFCVYSGRKISVVDLVRNPNQFEIDHIIPQSVSLDDSLNNKVLCFSEENQKKGQQTPFYYHKGKSGNWTYEQYKLFVEKLFDKKKISNKKRELLLFEEDINKWDVRRGFIARNLVDTRYASRVILNSYQQYFGNHEMGTKVKVVRGKFTSQLRKKWRIFKDRNESHSHHAIDALIVAATANLRLWKKNTLGVSDEGKVYDKETGEILPFEKLTESEYNEMMNKEPYLNFKTKLQNIETKVKYSYRVSKKVNRKISDATIYSTRERDGIDYIVGKIKNIYDVKTYKDQFLKRYKKNKEQFLMYQHDPQTFAILENIMATYQDAENPFLAYKKEYGVIRKYSKKGGGSPVTSLKFIDKVLGQKIDLTAKNQAALPKNKKVVLQSITPYRADVYYDEIDKRYHLIGVKYSLFSFSKQGYVINPIAYQKLLEKEQIHSEMKFCFSLYREDIIEFGEDPDSLTRYRFWSKNESGKNKIEVKPIEKPNFEKQTVLTITKKIKILNKYQTDVLGNSFKAQEEKDPRNIE

SEQ ID NO: 540 - protein, 1345 aa, Marinilabilia sp.
MKKILGLDLGTTSIGWAFIKEPEKDVVGSEIVDMGVRIVALSSDEENDFAKGNTISINADRTLKRGARRNLQRFKLRRDALLEIFKEMKLIPSNFKYAEDGPSSTFSTLKLRDKAAKEKIELDDLVKVLLQINKKRGYRSSRKAKSEEDDGSAIDSMGIAKELYENDLTPGQWVFEALQKGRKNVPDFYRSDLQEEFKKIVNYQSEFYPDVLNSSFVEDWMGKASTPTKQYFNKKGVHLAENKGKREERRLQEYNWRAVAVNSKIDLSEIALILSQINSQISNSSGYLGAISDRSKELYFKNQTVGQYLYQQIKINPHTRLKGQVFYRQDYLDEFEKIWSVQSGFHPQLNDALKKEIRDITIFFQRRLKSQKHLISNCEFEDYHKVVPKSHPIFQEFRIWQNLNNLTLIKKDNLNEKSELALEDKIALANELAFKREQSVKDALNILGLKSSEWEFNFTKIEGNRTNHAFFEAFAKIIEIEDGEPLDLGNLKADDILDQFSEAFLRIGIDPGLLQVNNDIEGPNYEKQPYIQFWHLLYSSEDDQKLKQNLIKKFGFKPDHAKILASISLQDDHASLSSRAIKKILPHLQSGLIYDKACTYAGYNHSSSFTKEENEKRELSSELDLLKKNSLRNPVVEKILNQMINVVNAILKDPNLGKPDEIRVEMARELKANAEQRKNMTSNIASATRDHEKYREILKKEFGLKRVTKNDLLRYKLWLETDGISLYTGKPIEASKLFSKEYDIEHIIPKTRLFDDSFSNKTICERQLNIDKANVTAFSFLQNKLSGDEFEQYQSRVKSLFGKLSKAKIQKLLMANDKIPEDFIARQLQETRYISKKAKEILFEITRRVSVTTGTITDKLREDWGLVEIMKELNWEKYDKLGLTYTIEGKHGERLNKIKDWSKRNDHRHHAMDALTVALTKPAYIQYLNNLNAKELNGKKSTEIFAIEQKYLKRENGKLCFIPPVENIRTEAKKHLSKVLISYKAKNKVVTINKNRTNKKAGFNEQIALTPRGQLHKETVYGKAFHYSTKFEKIGASFDVQKINAVAKKEEREALLKRLAENGDDPKKAFTGKNSLSKMPIYLDLKRNIKLPEKVKTVVLEQNYTIRKNIDPDLKLDKVIDVGVKRILENRLKEFGGNAKLALSNLDENPIWLNKEKGITIKRVKISGVSNVESLHVKKDHFGEPILDQVGNEIPVDFVSTGNNHHVAIYEDEKGNLQEEVVSFFEAVVRQNQGLPIINKNHSLGWKFLFTLKQNEYFVFPSDDFDPTDVDLMDEENYHLISPNLFRVQKFTTKDYFFRHHLETTVEDKSELKGVSFKRLGLPGLNCIKKIRINHLGKIIQVGEY

SEQ ID NO: 541 - protein, 1091 aa, Mobiluncus mulieris
MDSRKYRVGIDVGTNSVGFAAVEEDDSGSPTRFLNTMVVIHDSGVDSEQKKYAITRLASAGTARRTRRLYRTRRQRLRELDDFISNELGYPLVNLENFADPYEPWKVRADLATTKLPNDELPEAMSIALRHMARHRGWRSPYQRVEALHLHAEISKEFAALKERVVEKTGDVFSDDATPAEVLVDLMGRQKVRGADGVLSGKLRQSDNANELRKIASVQGIDDETLNRIIDRVFSSKSPKGKASERVGMDALPGQGSKPRALKAMPSFQKFRVVSVICNLRIKDSGGDARPLSMEEKEKLIDYLMSSTTDDHVTWTDVADLLHVKRSQLQGTAKEGFDGERPYTRPPVNSTWSKIKDSKIKSLVALWKTGDVDVQSAIVEALSNASVLEDSRPGADIVVAYLESLDDKELESLDKVGLPAGRASYSEDSLERLTERMLRDDCDLFEARKREFNVADDWKPPADPIYAPVGNPGVDRVLKIVNRLLMAAEREWGAPTQINIEHVRSGFSSELMQREFERENERRRAQNEEAVKAILTEKGGNSRVSKYDITRYYAVKRQHCQCLYCGTPITFSDCELDHIVPRKGVGSTNTRVNLAAACRSCNRDKSNLPFAVWAGKASNFDVSIDDAVSRVKQWQRSQNEGVREFRAFQNEVISRLLKTTEDPEIDSRSLESVAWMARELHHRVEYYFQSKGAQTQVSVYRGAVTAQARKSSGLEDKVKMIGGGGKTRLDRRHHAMDAATIALMTPGISTTLSEKNNLRDAQKFTGQSETWKDYCGRTETARKHFAVWKSNMERLTDLFNDKLENDAIPVVQPLRLRLSNSKAHDDGIGKLDSKKLGSVWSLADIDRAATPQIWTALTRCDDFDPTKGLPENANRVIRAQGVKYESEDNIPVFPSNVAAIAVRDGYAEIGSTIHHARIYRIDDGKKTFYSMIRVFAVDLLKHQAEDLFTVKLPPSAISIRTCEDSLRRALSNGTAEYLGWLVPGDEIIVDTSDKAFHTGQIGDLLRNFPVNSFRLTGFPSNSRLRLKPVLLAGEGLRDDAEDSIKKILLGQGWRPAINVLFSKGKPRIVRRNSLGIERPSSNNGLPFSWEA

SEQ ID NO: 542 - protein, 1233 aa, Mycoplasma canis
MEKKRKVTLGFDLGIASIGWAIVDSETNQVYKLGSRLFDAPDTNLERRTQRGTRRLLRRRKYRNQKFYNLVKRTEVFGLSSREAIENRFRELSIKYPNIIELKTKALSQEVCPDEIAWILHDYLKNRGYFYDEKETKEDFDQQTVESMPSYKLNEFYKKYGYFKGALSQPTESEMKDNKDLKEAFFFDFSNKEWLKEINYFFNVQKNILSETFIEEFKKIFSFTRDISKGPGSDNMPSPYGIFGEFGDNGQGGRYEHIWDKNIGKCSIFTNEQRAPKYLPSALIFNFLNELANIRLYSTDKKNIQPLWKLSSIDKLNILLNLFNLPISEKKKKLTNANINDIVKKESTKSIMLSVEDIDMIKDEWAGKEPNVYGVGLSGLNIEESAKENKFKFQDLKILNVLINLLDNVGIKFEFKDRNDIIKNLELLDNLYLFLIYQKESNNKDSSIDLFIAKNELLNIENLKLKLKEFLLGAGNEFENHNSKTHSLSKKAIDAILPKLLDNNEGWNLEAIKNYDEEIKSQIEDNSSLMAKQDKKYLNDNFLKDAILPPNVKVTFQQAILIFNKIIQKFSKDFEIDKVVIELAREMTQDQENDALKGIAKAQKSKKSLVEERLEANNIDKSVFNDKYEKLIYKIFLWISQDFKDPYTGAQISTNEIVNNKVEIDHIIPYSLCFDDSSANKVLVHKQSNQEKSNSLPYEYIKQGHSGWNWDEFTKYVKRVFVNNVDSILSKKERLKKSENLLTTSYDGYDKLGFLARNLNDTRYATILFRDQLNNYAEHHLIDNKKMFKVIAMNGAVTSFIRKNMSYDNKLRLKDRSDFSHHAYDAAIIALFSNKTKTLYNLIDPSLNGIISKRSEGYWVIEDRYTGEIKELKKEDWTSIKNNVQARKIAKEIEEYLIDLDDEVFFSRKTKRKTNRQLYNETIYGIAAKTDEDGITNYYKKEKFSILDDKDIYLRLLREREKFVINQSNPEVIDQIIEIIESYGKENNIPSRDEAINIKYTKNKINYNLYLKQYMRSLTKSLDQFSEEFINQMIANKTFVLYNPTKNTTRKIKFLRLVNDVKINDIRKNQVINKFNGKNNEPKAFYENINSLGAIVFKNSANNFKTLSINTQIAIFGDKNWDIEDFKTYNMEKIEKYKEIYGIDKTYNFHSFIFPGTILLDKQNKEFYYISSIQTVRDIIEIKFLNKIEFKDENKNPDTSKTPKRLMFGIKSIMNNYEQVDISPFGINKKIFE

SEQ ID NO: 543 - protein, 1233 aa, Mycoplasma canis
MEKKRKVTLGFDLGIASVGWAIVDSETNQVYKLGSRLFDAPDTNLERRTQRGTRRLLRRRKYRNQKFYNLVKRTEVFGLSSREAIENRFRELSIKYPNIIELKTKALSQEVCPDEIAWILHDYLKNRGYFYDEKETKEDFDQQTIESMPSYKLNEFYKKYGYFKGALSQPTESEMKDNKDLKEAFFFDFSNKEWLKEINYFFNVQKNILSETFIEEFKKIFSFTRDISKGPGSDNMPSPYGIFGEFGDNGQGGRYEHIWDKNIGKCSIFTNEQRAPKYLPSALIFNFLNELANIRLYSTDKKNIQPLWKLSSIDKLNILLNLFNLPISEKKKKLTSANINDIVKKESTKSIMLSVEDIDMIKDEWAGKEPNVYGVGLSGLNIEESAKENKFKFQDLKILNVLINLLDNVGIKFEFKDRNDIIKNLELLDNLYLFLIYQKESNNKDSSIDLFIAKNESLNIENLKLKLKEFLLGAGNEFENHNSKTHSLSKKAIDAILPKLLDNNEGWNLEAIKNYDEEIKSQIEDNSFLMAKQDKKYLNDNFLKDAILPPNVKVTFQQAILIFNKIIQKFSKDFEIDKVVIELAREMTQDQENDALKGIAKAQKSKKSLVEERLEANNIDKSVFNEKYEKLIYKIFLWISQDFKDPYTGAKISANEIVDNKVEIDHIIPYSLCFDDSSANKVLVHKQSNQEKSNSLPYEYIKQGHSGWNWDEFTKYVKRVFVNNVDSILSKKERLKKSENLLTTSYDGYDKLGFLARNLNDTRYATILFRDQLNNYAEHHLIDDKKMFKVIAMNGAVTSFIRKNMSYDNKLRLKNRNDFSHHAYDAAIIALFSNKTKTLYNLIDPSLNGIISKRSEGYWVIEDRYTGEIKELKKEDWTSIKNNVQARKIAKEIEEYLIDLDDEVFFSRKTKRKTNRQLYNETIYGIAAKTDEDGITNYYKKEKLSILDDKDIYLRLLREREKFVINQSNPEVIDQIIEIIESYGKENNIPSRDEAINIKYTKNKINYNLYLKQYMRSLTKSLDQFSEEFINQMIANKTFVLYNPTKNTTRKIKFLRLVNDVKINDIRKNQVINKFNGKNNEPKAFYENINSLGAIVFKNSANNFKTLSINTQIAIFGDKNWDIEDFKTYNMEKIEKYKEIYGIDKTYNFHSFIFPGTILLDKQNKEFYYISSIQTVRDIIEIKFLNKIEFKDENKNQDTSKTPKRLMFGIKSIMNNYEQVDISPFGINKKIFE

SEQ ID NO: 544 - protein, 1233 aa, Mycoplasma canis; identical to SEQ ID NO: 247

SEQ ID NO: 545 - protein, 1233 aa, Mycoplasma canis
MEKKRKVTLGFDLGIASVGWAIVDSETNQVYKLGSRLFDAPDTNLERRTQRGTRRLLRRRKYRNQKFYNLVKRTEVFGLSSREAIENRFRELSIKYPNIIELKTKALSQEVCPDEIAWILHDYLKNRGYFYDEKETKEDFDQQTVESMPSYKLNEFYKKYGYFKGALSQPTESEMKDNKDLKEAFFFDFSNKEWLKEINYFFNVQKNILSETFIEEFKKIFSFTRDISKGPGSDNMPSPYGIFGEFGDNGQGGRYEHIWDKNIGKCSIFTNEQRAPKYLPSALIFNFLNELANIRLYSTDKKNIQPLWKLSSVDKLNILLNLFNLPISEKKKKLTSTNINDIVKKESIKSIMISVEDIDMIKDEWAGKEPNVYGVGLSGLNIEENAKENKFKFQDLKILNVLINLLDNVGIKFEFKDRNDIIKNLELLDNLYLFLIYQKESNNKDSSIDLFIAKNKSLNIENLKLKLKEFLLGAGNEFENHNSKSHSLSKKAIDAILPKLLDNNEGWNLEAIKNYDEEIKSQIEDNSSLMAKQDKKYLNDNFLKDAILPPNVKVTFQQAILIFNKIIQKFSKDFEIDKVVIELAREMTQDQENDALKGMAKAQKSKKSLVEERLEANNIDKSVFNDKYEKLIYKIFLWISQDFKDPYTGAQISVNEIVNNKVEIDHIIPYSLCFDDSSANKVLVHKQSNQEKSNSLPYEYIKQGHSGWNWDEFTKYVKRVFVNNVDSILSKKERLKKSENLLTTSYDGYDKLGFLARNLNDTRYATILFRDQLNNYAEHHLIDNKKMFKVIAMNGAVTSFIRKNMSYDNKLRLKDRSDFSHHAYDAAIIALFSNKTKTLYNLIDPSLNGIISKRSEGYWVIEDRYTGEIKELKKEDWTSIKNNVQARKIAKEIEEYLIDLDDEVFFSRKTKRKTNRQLYNETIYGIAAKTDEDGITNYYKKEKFSILDDKDIYLRLLREREKFVINQSNPEVIDQIIEIIESYGKENNIPSRDEAINIKYTKNKINYNLYLKQYMRSLTKSLDKFSEEFINQMIANKTFVLYNPTKNTTRKIKFLRLVNDVKINDIRKNQVINKFNGKNNEPKAFYENINSLGAIVFKNSANNFKTLSINTQIAIFGDKNWDIEDFKTYNMEKIEKYKEIYGIDKTYNFHSFIFPGTILLDKQNKEFYYISSIQTVRDIIEIKFLNKIEFKDENKNQDTSKTPKRLMFGIKSIMNNYEQVDISPFGINKKIFE

SEQ ID NO: 546 - protein, 1233 aa, Mycoplasma canis
MEKKRKVTLGFDLGIASVGWAIVDSETNQVYKLGSRLFDAPDTNLERRTQRGTRRLLRRRKYRNQKFYNLVKRTEVFGLSSREAIENRFRELSIKYPNIIELKTKALSQEVCPDEIAWILHDYLKNRGYFYDEKETKEDFDQQTVESMPSYKLNEFYKKYGYFKGALSQPTESEMKDNKDLKEAFFFDFSNKEWLKEINYFFNVQKNILSETFIEEFKKIFSFTRDISKGPGSDNMPSPYGIFGEFGDNGQGGRYEHIWDKNIGKCSIFTNEQRAPKYLPSALIFNFLNELANIRLYSTDKKNIQPLWKLSSVDKLNILLNLFNLPISEKKKKLTSTNINDIVKKESIKSIMLSVEDIDMIKYEWAGKEPNVYGVGLSGLNIEESAKENKFKFQDLKILNVLINLLDNVGIKFEFKDRNDIIKNLELLDNLYLFLIYQKESNNKDSSIDLFIAKNKSLNIENLKLKLKEFLLGAGNEFENHNSKTHSLSKKAIDAILPKLLDNNEGWNLEAIKNYDEEIKSQIEDNSSLMAKQDKKYLNDNFLKDAILPPNVKVTFQQAILIFNKIIQKFSKDFEIDKVVIELAREMTQDQENDALKGIAKAQKSKKSLVEERLEANNIDKSVFDDKYEKLIYKIFLWISQDFKDPYTGAKISANEIVNNKVEIDHIIPYSLCFDDSSANKVLVHKQSNQEKSNSLPYEYIKQGHSGWNWDEFTKYVKRVFVNNVDSILSKKERLKKSENLLTTSYDGYDKLGFLARNLNDTRYATILFRDQLNNYAEHHLIDNKKMFKVIAMNGAVTSFIRKNMSYDNKLRLKDRSDFSHHAYDAAIIALFSNKTKTLYNLIDPSLNGIISKRSEGYWVIEDRYTGEIKELKKEDWTSIKNNVQARKIAKEIEEYLIDLDDEVFFSRKTKRKTNRQLYNETIYGIAAKTDEDGITNYYKKEKFSILDDKDIYLRLLREREKFVINQSNPEVIDQIIEIIESYGKENNIPSRDEAINIKYTKNKINYNLYLKQYMRSLTKSLDQFSEEFINQMIANKTFVLYNPTKNTTRKIKFLRLVNDVKINDIRKNQVINKFNGKNNEPKAFYENINSLGAIVFKNSANNFKTLSINTQIAIFGDKNWDIEDFKTYNMEKIEKYKEIYGIDKTYNFHSFIFPGTILLDKQNKEFYYISSIQTVRDIIEIKFLNKIEFKDENKNQDTSKTPKRLMFGIKSIMNNYEQVDISPFGINKKIFE

SEQ ID NO: 547 - protein, 1239 aa, Mycoplasma cynos
MEEKRKVTLGFDLGVASVGWAIVDSETNEVYKLGSRLFDIPDTNIDRRAKRGSRRLVRRRSYRNQKFYNLIKRTKTFGFLDKEAIEKEFVLLSIKYPNIIELKVKGLQEEVSKSEAVWILHDYLKNRGYFYDDKEEKDDLENPSIESMPSYKLYEFYKEYGYFKGALSSPTESEKNKDSDLEKAIFFNFSNKEWTKEINHFFKIQKNIFSEDFKAKFMEFFSFIRDISKGPGSENMPSQYSIFGKYGDDGMGGKYQHIWDKNIGKCSIFKDKVRAPKYLPSALFFNLLNELSNIRLYSVDKREKSVLWRLSSKDKINIILNILQIILFKNDGKISNLDINKIVKNESIKSIILNEIDLDLIKDMWFEKEPNVYGIGLSGLNIEENKKENRFKFQDLKIFSVFIDLLKKSNINIEFNNEKDIIHNLKLLDELYFFLITQKYSRDKYGSIKKFILNNKSFNIDNLDEKLNIFLSISDDEFDNHNSKTHSLSKEAIYFIFPKLLHNNEGWNLEAIKNYDIDVREEISKHSFGIKKQDKKYLDDAFLDDAILPPSVKVTIKQSILIFNKIIKKFSNKFQIDNVVIELAREMTQEKEMDAQKSLNRLKKSRKKIIEERLNANNIDSKMFRDKTGEISPNYIYKIYLWISQNFKDPYTGENISANDILKNNVEIDHIIPYSLCFDDSSSNKVLVFKHSNQSKGNFLPFDMISTFSENSVWNWKEYTQYVEKTFKTNLESILDKKERVKKADNLLTSSYDGYDKLGFLARNLNDTRYATILFRDQLINYSENHLIDSKKMFKVIAMNGGVTSFIRKNMSFDSGLKVKDRSIFSHHAYDAAIIALFSNKTKILYNLINPSLDGIISKRSEGYWVLEDRLTGEIRKLNYNDWQSIKNNVEVKKIAREIESHLSNLDNVVMFSRKSKRKTNKELYNETLYGIATRIDENGIKNYYKKEKFNILEDENIYLRLLNERENFIINRSNPEVIDAIIEIFETIDKNKIPARDVAKNIKYTDNKIKYNLYLKDYMRKLVDEFPDKFRKDFIEQMIAKKIFILFNPIKNTTRKIKSLRSINNNKIEDIRKKQVLEKFNTAKNEPRSFYESLNSLGAIIFKNNLNIYKKMSISSQIATFGDKNWKIDDINTYNKEKLNKYKEIYGIDETYDFYSFIFPGTILLDEKNKEFLYISSIQTLKDKIELKFLDRIEFEKKNVNSNLKPKIKREIISTKKLMSDYKIIKISPLGINKKIFE

SEQ ID NO: 548 - protein, 1269 aa, Mycoplasma gallisepticum
MNNSIKSKPEVTIGLDLGVGSVGWAIVDNETNIIHHLGSRLFSQAKTAEDRRSFRGARRLIRRRKYKLKRFINLIWKYNSYFGFKNKEDILNNYQEQQKLHNTVLNLKLEALNAKIDPKALSWILHDYLKNRGHFYEDNRDFNVYPTEELANYFGEYGYYKGIIDSKEDNDDKLEEGLTKYKFSNQHWLEEIKKVLSNQTGLPEKFKEEYESLFSYVRNYSEGPGSINSVSPYGIYHLDEKEGKVVQKYNNIWDKTIGKCSIFPDEYRAPKNSPIAMIFNEINELSTIRSYSIYLTGWFINQEFKKAYLNKLLDLLIKTNSEKPIDARQFKKLREETIAESIGKETLKDVEREEKLEKEDHKWKLKGLKLNTNGKIQYNDLSSLAKFVHKLKQHLKLDFLLEDQYTTLDKINFLQSLFVYLGKHLRYSNRVDSANLKEFSDSNKLFERVLQEQKDDLFKLFEQTDKDDEKILAQTHSLSTKAMLLAITRMTNLDNDEDNQKNNDKGWNFEAIKNFDQKFIDITKKNNNLSLKQDKRYLDDRFINDAILSPGVKRILREATKVFNAILKQFSEEYDVTKVVIELARELSEEKELENTKNYEKLIKKNSDKISERLEALDIAEDKIEDILKSPTKSYKVLLWLQQDHIDPYSQKEIAFEDILTKTEKTEIDHIIPYSISFDDSSSNKLLVLAESNQAKSNQTPYEFITSGNAGIKWEDYEAYCRKFKDGDTSLLDSTQRSKKFAKMMKTDTSSKYDIGFLARNLNDTRYATIVFRDALKDYANNHLVEDKPMFKVVCINGGVTSFLRKNFDKSWYAKKDRDKNIHHAVDASIISIFSNETKTLFNQLTQFADYKLFKNTDGSWKKIDPKTGVVTEVTDENWKQIRVRNQVSEIAKVINKCIQDSNIERKARYSRKIENKTNISLFNDTVYSAKKVGYEDQIKRKNLKTLDIHESAEENKNSKVKKQFVYRKLVNVSLLNNDKLADLFAEKEDILMYRANPWVINLAEQIFNEYTENKKIKSQNVFEKYMLDLTKEFPEKFSEAFVKSMLRNKTAIIYNVEKKVVHRIKRLKILSSELKENKLSNVIIRSKNESGTKLSYQDTINSIALMIMRSIDPTAKKQYIRVPLNTLNLHLGDQDFDLHNIDAYLKKPKFVKYLKANEIGDEYKPWRVLTSGTLLIHKKDKKLMYISSFQNLKDVIEIKNLIETEYKENDDSDPKKKKKANRFLMTLSTILNDYILLDAKDNFDILGLSKNRIDEILNSKLGLDKITK

SEQ ID NO: 549 - protein, 1224 aa, Mycoplasma gallisepticum
MNNSIKSKPEVTIGLDLGVGSVGWAIVDNETNIIHHLGSRLFSQAKTAEDRRSFRGARRLIRRRKYKLKRFINLIWKYNSYFGFKNKEDILNNYQEQQKLHNTVLNLKLEALNAKIDPKALSWILHDYLKNRGHFYEDNRDFNVYPTEELANYFGEYGYYKGIIDSKEDNDDKLEEGLTKYKFSNQHWLEEIKKVLSNQTGLPEKFKEEYESLFSYVRNYSEGPGSINSVSPYGIYHLDEKEGKVVQKYNNIWDKTIGKCSIFPDEYRAPKNSPIAMIFNEINELSTIRSYSIYLTGWFINQEFKKAYLNKLLDLLIKTNSEKPIDARQFKKLREETIAESIGKETLKDVEREEKLEKEDHKWKLKGLKLNTNGKIQYNDLSSLAKFVHKLKQHLKLDFLLEDQYTTLDKINFLQSLFVYLGKHLRYSNRVDSANLKEFSDSNKLFERVLQEQKDDLFKLFEQTDKDDEKILAQTHSLSTKAMLLAITRMTNLDNDEDNQKNNDKGWNFEAIKNFDQKFIDITKKNNNLSLKQDKRYLDDRFINDAILSPGVKRILREATKVFNAILKQFSEEYDVTKVVIELARELSEEKELENTKNYEKLIKKNSDKISERLEALDIAEDKIEDILKSPTKSYKVLLWLQQDHIDPYSQKEIAFEDILTKTEKTEIDHIIPYSISFDDSSSNKLLVLAESNQAKSNQTPYEFITSGNAGIKWEDYEAYCRKFKDGDTSLLDSTQRSKKFAKMMKTDTSSKYDIGFLARNLNDTRYATIVFRDALKDYANNHLVEDKPMFKVVCINGGVTSFLRKNFDKSWYAKKDRDKNIHHAVDASIISIFSNETKTLFNQLTQFADYKLFKNTDGSWKKIDPKTGVVTEVTDENWKQIRVRNQVSEIAKVINKCIQDSNIERKARYSRKIENKTNISLFNDTVYSAKKVGYEDQIKRKNLKTLDIHESAEENKNSKVKKQFVYRKLVNVSLLNNDKLADLFAEKEDILMYRANPWVINLAEQIFNEYTENKKIKSQNVFEKYMLDLTKEFPEKFSEAFVKSMLRNKTAIIYNVEKKVVHRIKRLKILSSELKENKLSNVIIRSKNESGTKLSYQDTINSIALMIMRSIDPTAKKQYIRVPLNTLNLHLGDQDFDLHNIDAYLKKPKFVKYLKANEIGDEYKPWRVLTSGTLLIHKKDKKLMYISSFQNLKDVIEIKNLIETEYKENDDSDPKKRRKQIGS

SEQ ID NO: 550 - protein, 1269 aa, Mycoplasma gallisepticum; identical to SEQ ID NO: 138

SEQ ID NO: 551 - protein, 226 aa, Mycoplasma iowae
MSNKKKITIGLDIGVSSVGWSILREDNVLIDYGSRLFPDAANAKDGKLENEARRSHRSMRRRIRRIKTRKNDLIKLLIKYNIISDQDELAKILEQGIVNETGNVPIVEIKYKGLKEKLSKEELLICLYHYIHKRGYFYITEEDLKENGENINRLPTEIQYDFYMKNGYYIGNEDNQKFSNLIWVKEIEKFLSKQSLDSNFVDEYISLFRRVRDYSDGPGSEKSPTP

SEQ ID NO: 552 - protein, 1304 aa, Mycoplasma synoviae
MLNNVQNLWKYLLLLIFDKKIIFLFKIKVILIRRYMENNNKEKIVIGFDLGVASVGWSIVNAETKEVIDLGVRLFSEPEKADYRRAKRTTRRLLRRKKFKREKFHKLILKNAEIFGLQSRNEILNVYKDQSSKYRNILKLKINALKEEIKPSELVWILRDYLQNRGYFYKNEKLTDEFVSNSFPSKKLHEHYEKYGFFRGSVKLDNKLDNKKDKAKEKDEEEESDAKKESEELIFSNKQWINEIVKVFENQSYLTESFKEEYLKLFNYVRPFNKGPGSKNSRTAYGVFSTDIDPETNKFKDYSNIWDKTIGKCSLFEEEIRAPKNLPSALIFNLQNEICTIKNEFTEFKNWWLNAEQKSEILKFVFTELFNWKDKKYSDKKFNKNLQDKIKKYLLNFALENFNLNEEILKNRDLENDTVLGLKGVKYYEKSNATADAALEFSSLKPLYVFIKFLKEKKLDLNYLLGLENTEILYFLDSIYLAISYSSDLKERNEWFKKLLKELYPKIKNNNLEIIENVEDIFEITDQEKFESFSKTHSLSREAFNHIIPLLLSNNEGKNYESLKHSNEELKKRTEKAELKAQQNQKYLKDNFLKEALVPLSVKTSVLQAIKIFNQIIKNFGKKYEISQVVIEMARELTKPNLEKLLNNATNSNIKILKEKLDQTEKFDDFTKKKFIDKIENSVVFRNKLFLWFEQDRKDPYTQLDIKINEIEDETEIDHVIPYSKSADDSWFNKLLVKKSTNQLKKNKTVWEYYQNESDPEAKWNKFVAWAKRIYLVQKSDKESKDNSEKNSIFKNKKPNLKFKNITKKLFDPYKDLGFLARNLNDTRYATKVFRDQLNNYSKHHSKDDENKLFKVVCMNGSITSFLRKSMWRKNEEQVYRFNFWKKDRDQFFHHAVDASIIAIFSLLTKTLYNKLRVYESYDVQRREDGVYLINKETGEVKKADKDYWKDQHNFLKIRENAIEIKNVLNNVDFQNQVRYSRKANTKLNTQLFNETLYGVKEFENNFYKLEKVNLFSRKDLRKFILEDLNEESEKNKKNENGSRKRILTEKYIVDEILQILENEEFKDSKSDINALNKYMDSLPSKFSEFFSQDFINKCKKENSLILTFDAIKHNDPKKVIKIKNLKFFREDATLKNKQAVHKDSKNQIKSFYESYKCVGFIWLKNKNDLEESIFVPINSRVIHFGDKDKDIFDFDSYNKEKLLNEINLKRPENKKFNSINEIEFVKFVKPGALLLNFENQQIYYISTLESSSLRAKIKLLNKMDKGKAVSMKKITNPDEYKIIEHVNPLGINLNWTKKLENNN

SEQ ID NO: 553 - protein, 1401 aa, Myroides injenensis
MKRILGLDLGTTSIGWAYVHEAENVNETSSIQKVGVRVNPLTTEEQTNFEKGKPITTNASRTLARSARRNLQRYKLRRDNLIQILKENNWINNTTSLTETGNHSTFETYELRNKAASEKLTLDQLSRVLLMLNKKRGYKSSRKVNSKEEGQLIDGMEVAKKLYHEQLTPGQLSLQLMNQGVKKLPDYYRSDLNQELESIWNFQQQFYPNILTDKFKEEINGKGLTSTSSAFWNIYNFNTAENKGSRDEKKKQALQWRSEALSKQLSKEIVAYIIADLNGQIYNSSGYLGAISDRSKELYFNNLTVGQYLFKQLKSNPHTSLKNQVFYRQDYLNEFEKIWETQSKFYPKELTAALKREIRDVIIFYQRKLKSQKGLISFCEFEQKQKTINGKTKTIGHRVIPKSSPLFQEFKIWQQLHNVVLRNKKTNEIVSLADEQKVHLFEELNLKGKLKSNQVLKLIENKPKDWELNYTELEGNNTNKALYNAYLDILDIEGYDVRNELKVKLNKDDIELSDLDVNASEIKEMIFSVFKHLGINTEILEFDATLEDKVFEKQASYQLWHLLYSYEEDNSPTGLDRLYNLLHKKFGFKLNHAKLIGNVLFQDDYGSLSSKAIKNIFPYITENNYYTACELAGYKHSKHSLTKEENETRELKNRLTILPKNSLRNPVVEKIINQMINVVNTLIDEENNILIAQGKEPNFQFDEIRIELARELKKNAKEREELTKSINKSKTDHEKIIKILQKEDGIKNPTRNDIVRFKLYSELKNNGYKDLYTNEYIERKDIFTKEYDIEHIIPQSKLFDDSFSNKTLVRRNVNLKKGNQTAYDFILCEYGQEKANEFETRITNLYNLGKDEGISKSKFKKLLMQESEIGNGFIERDLRETQYIAKKAKSLLLEITRNVISTSGSITDRLREDWGLINVMKELNLQKYRDAGLTEFVKMKDGNKKEVIIDWTKRNDHRHHAMDALTIAFTKHNHIQYLNHLNARKNVNNELHNNIIAIEKLETTLVSDERGNKKRIFKEPIANFRTIAKSHLEAILVSHKAKNKVVTKNINKISGKKISQQTLTPRGQLHKETIYGKIRQYVSKQEKVGPKFTIEVIEQVSNPTYRNLLLKRLEENNNDPKKAFGGKNSLNKNPIYINLEKNIKVPEVLKLVWLEDNYTIRKEISPDLKIDKVIDQGVKQILQNRLAQYKGDSKLAFSNLDANPIWLNEDKGIAIKRVTISGIATAQPLHRKKDHLGQPILDHNGQEIPVDFISTGNNHHVAIYEDENGKLQESVVSHFEAVERVNQKLPIIDKTFNQHLGWKFLFTMKQNELFLFPSDDFNPNEIDLFDKQNYTVISKHLFRIQKLSTKDYSFRHHLETNVEEIKDLKTITWRREGLNGIQNIIKVRTNHLGEIIHIGEY

SEQ ID NO: 554 - protein, 1466 aa, Myroides odoratus
MKNILGLDLGTNSIGWALVKEDFENKQGEILGLGSRIIPMSQDILGEFGRGNSISQTADRTGYRGVRRLRERHLLRRERLHRVLNILGFLPNHYAKEIDFTKRLGKFINHAEPKLSFDKEFIFKDSFNEMLKDFQQNQPGFIINKHGEEALVPYDWTIYYLRKKALTQKIDKEELAWILLNFNQKRGYYQLRGEEEEENTNKLVEFYSLKIIDVIADNEVNKKGEVWYSLHLENGWIYRRSSKISLVDWKDKVRDFIVTTDVNDDGSEKLDKDGVVKRSFRAPSADDWTLLKKKTEQDIDNSNKTVGAYIYENLLLNPKQKIKGKLVRTIERKFYKDELKQILEKQKEFHQELQNEQLLQDCVRELYKYNEQHQQMLESKDFVHLFLNDIIFYQRPLRSQKSLISNCTLEKRVSRDGVVFPIKVISKSNPYYQEFRLLQWLQNLAIYRKDDDVNVTQEFLNSIESWENLLQFLNAKKEIKQEQLIKFLLEQKGLKGNSLKTAILTYRWNYVTDKVYPMNETRSLIQDKLKKVENVATDFLSFDNEMALWHIIYSVNDKIEYEKALAKFASKHNLDEISFVESFKKFPPFKSDYGSFSEKAIKKLLPLMRFGSVWNKNNIVPSVLDRIDKILTGEYDEKIKIRVREKAEQFQLNQIEDFQNLPLWLAQYVVYDRHSEAEIAGKWNSVKDLENYLKEFKQHSLRNPIVEQIITETLRVVKDIWQQYGNGVQNFFDEIHIELGREMKNTADERKRITNSVTENENTNLRIKALLVELKEDTNIENVRPHSPMQQEILKIYEEGVLNAVENIDEDILKISKTAQPSKSELIRYKLWLEQKYQSPYTGEMIPLSRLFTSDYEIEHVIPQSRYFDDSLSNKVICEAAVNKRKDNQLGLEFIKNHHSEKIELGNGRTAQVLEVEAYESFVKKNYDKNRGKRNKLLLEDVPEKMIERQLNDTRYISKFVTHLLSNIVRKDEVNSKDDGINSKNIIPGNGKITSQLKQDWGLNDVWNELILPRFERMNNLTNSTDFTSTNTNGKIIPTVPLEYSKGFSKKRIDHRHHALDALVIALATRDHVNLLNNESALPKKDRTKEEQKSFRFDLQVNLRNKEKYFNVKEGREKEKFTTFKKPWNTLTQDTRDALENMVVSFKQNLRVINKATNYYESYTDENGNLRLDKYGNPKKELISQKGTNWAIRKSLHKETVSGQIHLDRVKVTKGKIVTATRKSLDSSFNEKSIESITDTGIQKILRNYLKAKDNKPDVAFSPEGIEELNKSISVYNEGKNHQPIIKVRIFEQGSKFPVGETGNKIAKFVEAAKGTNLFFGIYQDKTGKRSYDTIPLNLVIERLKQGLSPVPETNEKGHQLLFHLSPNDLVYVPTIDDNEQLDSNRVYKFTDSSDTTCNFIPSNISAIIFNINSKEQEKRGINYPIQNELGVGSPQSKNQKSFDGFMIKEVCIKLKVDRLGNISKT

SEQ ID NO: 555 - protein, 241 aa, Neisseria lactamica
MAAFKPNPMNYILGLDIGIASVGWAMVEIDKEENPIRLIDLGVRVFERAEMPKTGDSLAMARRLARSVRRLTRRRAHRLLRARRLLKREGVLQDADFDENGLVKSLPNTPWQLRAAALDRKLTCLEWSAVLLHLIKHRGYLSQRKNEGETADKELGALLKGVADNAHALQTGDFRTPAELALNKFEKESGHIRNQRGDYSHTFSRKDLQAELNLLFEKQKEFGNPHVSDGLKEGIETLLMA

SEQ ID NO: 556 - protein, 666 aa, Neisseria lactamica
MAAFKPNPMNYILGLDIGIASVGWAMVEVDEEENPIRLIDLGVRVFERAEVPKTGDSLAMARRLARSVRRLTRRRAHRLLRARRLLKREGVLQDADFDENGLVKSLPNTPWQLRAAALDRKLTCLEWSAVLLHLVKHRGYLSQRKNEGETADKELGALLKGVADNAHALQTGDFRTPAELALNKFEKESGHIRNQRGDYSHTFSRKDLQAELNLLFEKQKEFGNPHVSDGLKEDIETLLMAQRPALSGDAVQKMLGHCTFEPAEPKAAKNTYTAERFIWLTKLNNLRILEQGSERPLTDTERATLMDEPYRKSKLTYAQARKLLGLEDTAFFKGLRYGKDNAEASTLMEMKAYHAISRALEKEGLKDKKSPLNLSTELQDEIGTAFSLFKTDKDITGRLKDRVQPEILEALLKHISFDKFVQISLKALRRIVPLMEQGKRYDEACAEIYGDHYCKKNAEEKIYLPPIPADEIRNPVVLRALSQARKVINCVVRRYGSPARIHIETAREVGKSFKDRKEIEKRQEENRKDREKAAAKFREYFPNFVGEPKSKDILKLRLYEQQHGKCLYSGKEINLVRLNEKGYVEIDHALPFSRTWDDSFNNKVLVLGSENQNKGNQTPYEYFNGKDNSREWQEFKARVETSRFPRSKNNGFCCKNSMKKDLKNAT

SEQ ID NO: 557 - protein, 828 aa, Neisseria lactamica
MLGHCTFEPAEPKAAKNTYTAERFIWLTKLNNLRILEQGSERPLTDTERATLMDEPYRKSKLTYAQARKLLGLEDTAFFKGLRYGKDNAEASTLMEMKAYHAISRALEKEGLKDKKSPLNLSTELQDEIGTAFSLFKTDKDITGRLKDRVQPEILEALLKHISFDKFVQISLKALRRIVPLMEQGKRYDEACAEIYGDHYGKKNTEEKIYLPPIPADEIRNPVVLRALSQARKVINAVVRRYDSPARIHIETAREVGKSFKDRKEIEKRQEENRKDREKAAAKFREYFPNFVGEPKSKDILKLRLYEQQHGKCLYSGKEINLVRLNEKGYVEIDHALPFSRTWDDSFNNKVLVLGSENQNKGNQTPYEYFNGKDNSREWQEFKARVETSRFPRSKKQRILLQKFDEEGFKERNLNDTRYVNRFLCQFVADHILLTGKGKRRVFASNGQITNLLRGFWGLRKVRAENDRHHALDAVVVACSTVAMQQKITRFVRYKEMNAFDGKTIDKETGEVLHQKAHFPQPWEFFAQEVMIRVFGKPDGKPEFEEADTSEKLRTLLAEKLSSRPEAVHEYVTPLFVSRAPNRKMSGQGHMETVKSAKRLDEGISVLRVPLTQLKLKDLEKMVNREREPKLYDALKAQLETHKDDPAKAFAEPFYKYDKAGSRTQQVKAVRIEQVQKTGVWVRNHNGIADNATMVRVDVFEKGGKYYLVPIYSWQVAKGILPDRAVVAFKDEEDWTVMDDSFEFRFVLYANDLIKAELKKETFFGYFSGLDRSTGNISLRSHDLDKTKGKDGVYRIGIKTALSFQKHQIDELGKEIRPCRLKKRPPVR

SEQ ID NO: 558 - protein, 408 aa, Neisseria lactamica
MNDTRYVNRFLCQFVADHILLTGKGKRRVFASNGQITNLLRGFWGLRKVRTENDRHHALDAVVVACSTVAMQQKITRFVRYKEMNAFDGKTIDKETGEVLHQKAHFPQPWEFFAQEVMIRVFGKPDGKPEFEEADTPEKLRTLLAEKLSSRPEAVHEYVTPLFVSRAPNRKMSGQGHMETVKSAKRLDEGISVLRVPLTQLKLKGLEKMVNREREPKLYDALKAQLETHKDDPAKAFAEPFYKYDKAGSRTQQVKAVRIEQVQKTGVWVRNHNGIADNATMVRVDVFEKGGKYYLVPIYSWQVAKGILPDRAVVAFKDEEDWTVMDDSFEFRFVLYANDLIKLTAKKNEFLGYFVSLNRATGAIDIRTHDTDSTKGKNGIFQSVGVKTALSFQKTKSTNSAKKSDHAV

SEQ ID NO: 559 - protein, 1082 aa, Neisseria meningitidis
MAAFKPNPINYILGLDIGIASVGWAMVEIDEDENPICLIDLGVRVFERAEVPKTGDSLAAARRLARSVRRLTRRRAHRLLRARRLLKREGVLQAADFDENGLIKSLPNTPWQLRAAALDRKLTPLEWSAVLLHLIKHRGYLSQRKNEGETADKELGALLKGVADNAHALQTGDFRTPAELALNKFEKESGHIRNQRGDYSHTFSRKDLQAELILLFEKQKEFGNPHVSGGLKEGIETLLMTQRPALSGDAVQKMLGHCTFEPAEPKAAKNTYTAERFIWLTKLNNLRILEQGSERPLTDTERATLMDEPYRKSKLTYAQARKLLGLEDTAFFKGLRYGKDNAEASTLMEMKAYHAISRALEKEGLKDKKSPLNLSPELQDEIGTAFSLFKTDEDITGRLKDRVQPEILEALLKHISFDKFVQISLKALRRIVPLMEQGKRYDEACAEIYGDHYGKKNTEEKIYLPPIPADEIRNPVVLRALSQARKVINGVVRRYGSPARIHIETAREVGKSFKDRKEIEKRQEENRKDREKAAAKFREYFPNFVGEPKSKDILKLRLYEQQHGKCLYSGKEINLGRLNEKGYVEIDHALPFSRTWDDSFNNKVLVLGSENQNKGNQTPYEYFNGKDNSREWQEFKARVETSRFPRSKKQRILLQKFDEDGFKERNLNDTRYVNRFLCQFVADRMRLTGKGKKRVFASNGQITNLLRGFWGLRKVRAENDRHHALDAVVVACSTVAMQQKITRFVRYKEMNAFDGKTIDKETGEVLHQKTHFPQPWEFFAQEVMIRVFGKPDGKPEFEEADTPEKLRTLLAEKLSSRPEAVHEYVTPLFVSRAPNRKMSGQGHMETVKSAKRLDEGVSVLRVPLTQLKLKDLEKMVNREREPKLYEALKARLEAHKDDPAKAFAEPFYKYDKAGNRTQQVKAVRVEQVQKTGVWVRNHNGIADNATMVRVDVFEKGDKYYLVPIYSWQVAKGILPDRAVVQGKDEEDWQLIDDSFNFKFSLHPNDLVEVITKKARMFGYFASCHRGTGNINIRIHDLDHKIGKNGILEGIGVKTALSFQKYQIDELGKEIRPCRLKKRPPVR

SEQ ID NO: 560 - protein, 976 aa, Neisseria meningitidis
MAAFKPNPINYILGLDIGIASVGWAMVEIDEDENPICLIDLGVRVFERAEVPKTGDSLAAARRLARSVRRLTRRRAHRLLRARRLLKREGVLQAADFDENGLIKSLPNTPWQLRAAALDRKLTPLEWSAVLLHLIKHRGYLSQRKNEGETADKELGALLKGVADNAHALQTGDFRTPAELALNKFEKESGHIRNQRGDYSHTFSRKDLQAELILLFEKQKEFGNPHVSGGLKEGIETLLMTQRPALSGDAVQKMLGHCTFEPAEPKAAKNTYTAERFIWLTKLNNLRILEQGSERPLTDTERATLMDEPYRKSKLTYAQARKLLGLEDTAFFKGLRYGKDNAEASTLMEMKAYHAISRALEKEGLKDKKSPLNLSPELQDEIGTAFSLFKTDEDITGRLKDRIQPEILEALLKHISFDKFVQISLKALRRIVPLMEQGKRYDEACAEIYGDHYGKKNTEEKIYLPPIPADEIRNPVVLRALSQARKVINGVVRRYGSPARIHIETAREVGKSFKDRKEIEKRQEENRKDREKAAAKFREYFPNFVGEPKSKDILKLRLYEQQHGKCLYSGKEINLGRLNEKGYVEIDHALPFSRTWDDSFNNKVLVLGSENQNKGNQTPYEYFNGKDNSREWQEFKARVETSRFPRSKKQRILLQKFDEDGFKERNLNDTRYVNRFLCQFVADRMRLTGKGKKRVFASNGQITNLLRGFWGLRKVRAENDRHHALDAVVVACSTVAMQQKITRFVRYKEMNAFDGKTIDKETGEVLHQKTHFPQPWEFFAQEVMIRVFGKPDGKPEFEEADTPEKLRTLLAEKLSSRPEAVHEYVTPLFVSRAPNRKMSGQGHMETVKSAKRLDEGVSVLRVPLTQLKLKDLEKMVNREREPKLYEALKARLEAHKDDPAKAFAEPFYKYDKAGNRTQQVKAVRVEQVQKTGVWVRNHNGIADNATMVRVDVFEKGDKYYLVPIYSWQVAKGIFAG

SEQ ID NO: 561 - protein, 1081 aa, Neisseria meningitidis
MAAFKPNPINYILGLDIGIASVGWAMVEIDEDENPICLIDLGVRVFERAEVPKTGDSLAAARRLARSVRRLTRRRAHRLLRARRLLKREGVLQAADFDENGLIKSLPNTPWQLRSAALDRKLTPLEWSAVLLHLIKHRGYLSQRKNEGETADKELGALLKGVADNAHALQTGDFRTPAELALNKFEKESGHIRNRRGDYSHTFSRKDLQAELDLLFEKQKEFGNPHISDDLKEGIETLLMTQRPALSGDAVQKMLGHCTFEPTEPKAAKNTYTAERFVWLTKLNNLRILEQGSERPLTDTERATLMDEPYRKSKLTYAQARKLLELDDTAFFKGLRYGKDNAEASTLMEMKAYHAISRALEKEGLKDKKSPLNLSPELQDEIGTAFSLFKTDEDITGRLKDRVQPEILEVLLKHISFDKFVQISLKALRRIVPLMEQGKRYDEACAEIYGDHDGKKNTEEKIYLPPIPADEIRNPVVLRALSQARKVINAVVRRYGSPARIHIETAREVGKSFKDRKEIEKRQEENRKDREKAAAKFREYFPNFVGEPKSKDILKLRLYEQQHGKCLYSGKEINLGRLNEKGYVEIDHALPFSRTWDDSFNNKVLVLGSENQNKGNQTPYEYFNGKDNSREWQEFKARVETSRFPRSKKQRILLQKFDEEGFKERNLNDTRYVNRFLCQFVADHMLLTGKGKRRVFASNGQITNLLRGFWGLRKVRAENNRHHALDAVVVACSTVAMQQKITRFVRYKEMNAFDGKTIDKETGEVLHQKTHFPQPWEFFAQEVMIRVFGKPDGKPEFEEADTPEKLRTLLAEKLSSRPEAVHEYVTPLFVSRAPNRKMSGQGHMETVKSAKRLDEGVSVLRVPLTQLKLKDLEKMVNREREPKLYEALKARLEAHKDDPAKAFAEPFYKYDKAGNRTQQVKAVRVEQVQKTGVWVRNHNGIADNATMVRVDVFEKAGKYYLVPIYSWQVAKGILPDRAVVAYADEEGWTVIDESFRFKFVLYSNDLIKVQLKKDSFLGYFSGLDRATGAISLREHDLEKSKGKDGMHRIGVKTALSFQKYQIDEMGKEIRLCRLKKRPPVR

SEQ ID NO: 562 - protein, 1081 aa, Neisseria meningitidis
MAAFKPNPINYILGLDIGIASVGWAMVEIDEDENPICLIDLGVRVFERAEVPKTGDSLAAARRLARSVRRLTRRRAHRLLRARRLLKREGVLQAADFDENGLIKSLPNTPWQLRSAALDRKLTPLEWSAVLLHLIKHRGYLSQRKNEGETADKELGALLKGVANNAHALQTGDFRTPAELALNKFEKESGHIRNQRGDYSHTFSRKDLQAELILLFEKQKEFGNPHVSGGLKEGIETLLMTQRPALSGDAVQKMLGHCTFEPAEPKAAKNTYTAERFIWLTKLNNLRILEQGSERPLTDTERATLMDEPYRKSKLTYAQARKLLGLEDTAFFKGLRYGKDNAEASTLMEMKAYHAISRALEKEGLKDKKSPLNLSPELQDEIGTAFSLFKTDEDITGRLKDRIQPEILEALLKHISFDKFVQISLKALRRIVPLMEQGKRYDEACAEIYGDHYGKKNTEEKIYLPPIPADEIRNPVVLRALSQARKVINGVVRRYGSPARIHIETAREVGKSFKDRKEIEKRQEENRKDREKAAAKFREYFPNFVGEPKSKDILKLRLYEQQHGKCLYSGKEINLGRLNEKGYVEIDHALPFSRTWDDSFNNKVLVLGSENQNKGNQTPYEYFNGKDNSREWQEFKARVETSRFPRSKKQRILLQKFDEDGFKERNLNDTRYVNRFLCQFVADRMRLTGKGKKRVFASNGQITNLLRGFWGLRKVRAENDRHHALDAVVVACSTVAMQQKITRFVRYKEMNAFDGKTIDKETGEVLHQKTHFPQPWEFFAQEVMIRVFGKPDGKPEFEEADTPEKLRTLLAEKLSSRPEAVHEYVTPLFVSRAPNRKMSGQGHMETVKSAKRLDEGVSVLRVPLTQLKLKDLEKMVNREREPKLYEALKARLEAHKDDPAKAFAEPFYKYDKAGNRTQQVKAVRVEQVQKTGVWVRNHNGIADNATMVRVDVFEKAGKYYLVPIYSWQVAKGILPDRAVVAYADEEGWTVIDESFRFKFVLYSNDLIKVQLKKDSFLGYFSGLDRATGAISLREHDLEKSKGKDGMHRIGVKTALSFQKYQIDEMGKEIRLCRLKKRPPVR

SEQ ID NO: 563 - protein, 1082 aa, Neisseria meningitidis
MAAFKPNPINYILGLDIGIASVGWAMVEIDEDENPICLIDLGVRVFERAEVPKTGDSLAMARRLARSVRRLTRRRAHRLLRARRLLKREGVLQAADFDENGLIKSLPNTPWQLRAAALDRKLTPLEWSAVLLHLIKHRGYLSQRKNEGETADKELGALLKGVADNAHALQTGDFRTPAELALNKFEKESGHIRNQRGDYSHTFSRKDLQAELILLFEKQKEFGNPHVSGGLKEGIETLLMTQRPALSGDAVQKMLGHCTFEPAEPKAAKNTYTAERFIWLTKLNNLRILEQGSERPLTDTERATLMDEPYRKSKLTYAQARKLLGLEDTAFFKGLRYGKDNAEASTLMEMKAYHAISRALEKEGLKDKKSPLNLSPELQDEIGTAFSLFKTDEDITGRLKDRIQPEILEALLKHISFDKFVQISLKALRRIVPLMEQGKRYDEACAEIYGDHYGKKNTEEKIYLPPIPADEIRNPVVLRALSQARKVINGVVRRYGSPARIHIETAREVGKSFKDRKEIEKRQEENRKDREKAAAKFREYFPNFVGEPKSKDILKLRLYEQQHGKCLYSGKEINLGRLNEKGYVEIDHALPFSRTWDDSFNNKVLVLGSENQNKGNQTPYEYFNGKDNSREWQEFKARVETSRFPRSKKQRILLQKFDEDGFKERNLNDTRYVNRFLCQFVADRMRLTGKGKKRVFASNGQITNLLRGFWGLRKVRAENDRHHALDAVVVACSTVAMQQKITRFVRYKEMNAFDGKTIDKETGEVLHQKTHFPQPWEFFAQEVMIRVFGKPDGKPEFEEADTPEKLRTLLAEKLSSRPEAVHEYVTPLFVSRAPNRKMSGQGHMETVKSAKRLDEGVSVLRVPLTQLKLKDLEKMVNREREPKLYEALKARLEAHKDDPAKAFAEPFYKYDKAGNRTQQVKAVRVEQVQKTGVWVRNHNGIADNATMVRVDVFEKGDKYYLVPIYSWQVAKGILPDRAVVQGKDEEDWQLIDDSFNFKFSLHPNDLVEVITKKARMFGYFASCHRGTGNINIRIHDLDHKIGKNGILEGIGVKTALSFQKYQIDELGEEIRPCRLKKRPPVR

SEQ ID NO: 564 - protein, 1082 aa, Neisseria meningitidis
MAAFKPNPINYILGLDIGIASVGWAMVEIDEDENPICLIDLGVRVFERAEVPKTGDSLAMARRLARSVRRLTRRRAHRLLRARRLLKREGVLQAADFDENGLIKSLPNTPWQLRAAALDRKLTPLEWSAVLLHLIKHRGYLSQRKNEGETADKELGALLKGVADNAHALQTGDFRTPAELALNKFEKESGHIRNQRGDYSHTFSRKDLQAELILLFEKQKEFGNPHVSGGLKEGIETLLMTQRPALSSDAVQKMLGHCTFEPAEPKAAKNTYTAERFIWLTKLNNLRILEQGSERPLTDTERATLMDEPYRKSKLTYAQARKLLGLEDTAFFKGLRYGKDNAEASTLMEMKAYHAISRALEKEGLKDKKSPLNLSPELQDEIGTAFSLFKTDEDITGRLKDRIQPEILEALLKHISFDKFVQISLKALRRIVPLMEQGKRYDEACAEIYGDHYGKKNTEEKIYLPPIPADEIRNPVVLRALSQARKVINGVVRRYGSPARIHIETAREVGKSFKDRKEIEKRQEENRKDREKAAAKFREYFPNFVGEPKSKDILKLRLYEQQHGKCLYSGKEINLGRLNEKGYVEIDHALPFSRTWDDSFNNKVLVLGSENQNKGNQTPYEYFNGKDNSREWQEFKARVETSRFPRSKKQRILLQKFDEDGFKERNLNDTRYVNRFLCQFVADRMRLTGKGKKRVFASNGQITNLLRGFWGLRKVRAENDRHHALDAVVVACSTVAMQQKITRFVRYKEMNAFDGKTIDKETGEVLHQKTHFPQPWEFFAQEVMIRVFGKPDGKPEFEEADTPEKLRTLLAEKLSSRPEAVHEYVTPLFVSRAPNRKMSGQGHMETVKSAKRLDEGVSVLRVPLTQLKLKDLEKMVNREREPKLYEALKARLEAHKDDPAKAFAEPFYKYDKAGNRTQQVKAVRVEQVQKTGVWVRNHNGIADNATMVRVDVFEKGDKYYLVPIYSWQVAKGILPDRAVVQGKDEEDWQLIDDSFNFKFSLHPNDLVEVITKKARMFGYFASCHRGTGNINIRIHDLDHKIGKNGILEGIGVKTALSFQKYQIDELGKEIRPCRLKKRPPVR

SEQ ID NO: 565 - protein, 1082 aa, Neisseria meningitidis
MAAFKPNPINYILGLDIGIASVGWAMVEIDEDENPICLIDLGVRVFERAEVPKTGDSLAMARRLARSVRRLTRRRAHRLLRARRLLKREGVLQAADFDENGLIKSLPNTPWQLRAAALDRKLTPLEWSAVLLHLIKHRGYLSQRKNEGETADKELGALLKGVADNAHALQTGDFRTPAELALNKFEKESGHIRNQRGDYSHTFSRKDLQAELILLFEKQKEFGNPHVSGGLKEGIETLLMTQRPALSSDAVQKMLGHCTFEPAEPKAAKNTYTAERFIWLTKLNNLRILEQGSERPLTDTERATLMDEPYRKSKLTYAQARKLLGLEDTAFFKGLRYGKDNAEASTLMEMKAYHAISRALEKEGLKDKKSPLNLSPELQDEIGTAFSLFKTDEDITGRLKDRIQPEILEALLKHISFDKFVQISLKALRRIVPLMEQGKRYDEACAEIYGDHYGKKNTEEKIYLPPIPADEIRNPVVLRALSQARKVINGVVRRYGSPARIHIETAREVGKSFKDRKEIEKRQEENRKDREKAAAKFREYFPNFVGEPKSKDILKLRLYEQQHGKCLYSGKEINLGRLNEKGYVEIDHALPFSRTWDDSFNNKVLVLGSENQNKGNQTPYEYFNGKDNSREWQEFKARVETSRFPRSKKQRILLQKFDEDGFKERNLNDTRYVNRFLYQFVADRMRLTGKGKKRVFASNGQITNLLRGFWGLRKVRAENDRHHALDAVVVACSTVAMQQKITRFVRYKEMNAFDGKTIDKETGEVLHQKTHFPQPWEFFAQEVMIRVFGKPDGKPEFEEADTPEKLRTLLAEKLSSRPEAVHEYVTPLFVSRAPNRKMSGQGHMETVKSAKRLDEGVSVLRVPLTQLKLKDLEKMVNREREPKLYEALKARLEAHKDDPAKAFAEPFYKYDKAGNRTQQVKAVRVEQVQKTGVWVRNHNGIADNATMVRVDVFEKGDKYYLVPIYSWQVAKGILPDRAVVQGKDEEDWQLIDDSFNFKFSLHPNDLVEVITKKARMFGYFASCHRGTGNINIRIHDLDHKIGKNGILEGIGVKTALSFQKYQIDELGKEIRPCRLKKRPPVR

SEQ ID NO: 566 - protein, 1081 aa, Neisseria meningitidis
MAAFKPNPINYILGLDIGIASVGWAMVEIDEDENPICLIDLGVRVFERAEVPKTGDSLAMARRLARSVRRLTRRRAHRLLRARRLLKREGVLQAADFDENGLIKSLPNTPWQLRAAALDRKLTPLEWSAVLLHLIKHRGYLSQRKNEGETADKELGALLKGVADNAHALQTGDFRTPAKLALNKFEKESGHIRNQRGDYSHTFSRKDLQAELNLLFEKQKEFGNPHISDGLKEGIETLLMTQRPALSGDAVQKMLGHCTFEPTEPKAAKNTYTAERFVWLTKLNNLRILEQGSEQPLTDTQRAKLMDEPYRKSKLTYAQARKLLGLEDTAFFKGLRYGKDNAEASTLMEMKAYHAISRALEKEGLKDKKSPLNLSPELQDEIGTAFSLFKTDEDITGRLKDRVQPEILEALLKHISFDKFVQISLKALRRIVPLMEQGKRYNEACAEIYGDHYGKKNTEEKIYLPPIPADEIRNPVVLRALSQARKVINGVVRRYGSPARIHIETAREVGKSFKDRKEIEKRQEENRKDREKAAAKFQEYFPNFVGEPKSKDILKLRLYEQQHGKCLYSGKEINLGRLNEKGYVEIDHALPFSRTWDDSFNNKVLVLGSENQNKGNQTPYEYFNGKDNSREWQEFKARVETSRFPRSKKQRILLQKFDEDGFKERNLNDTRYVNRFLCQFVADRMRLTGKGKKRVFASNGQITNLLRGFWGLRKVRAENDRHHALDAVVVACSTVAMQQKITRFVRYKEMNAFDGKTIDKETGEVLHQKTHFPQPWEFFAQEVMIRVFGKPDGKPEFEEADTPEKLRTLLAEKLSSRPEAVHEYVTPLFVSRAPNRKMSGQGHMETVKSAKRLDEGVSVLRVPLTQLKLKDLEKMVNREREPKLYEALKARLEAHKDDPAKAFAEPFYKYDKAGNRTQQVKAVRVEQVQKTGVWVRNHNGIADNATMVRVDVFEKGDKYYLVPIYSWQVAKGILPDRAVVAYADEEDWTVIDESFRFKFVLYSNDLIKVQLKKDSFLGYFSGLDRATGAISLREHDLEKSKGKDGMHRIGVKTALSFQKYQIDEMGKEIRPCRLKKRPPVR

SEQ ID NO: 567 - protein, 1081 aa, Neisseria meningitidis
MAAFKPNPINYILGLDIGIASVGWAMVEIDEEENPIRLIDLGVRVFERAEVPKTGDSLAMARRLARSVRRLTRRRAHRLLRARRLLKREGVLQAADFDENGLIKSLPNTPWQLRAAALDRKLTPLEWSAVLLHLIKHRGYLSQRKNEGETADKELGALLKGVADNAHALQTGDFRTPAELALNKFEKECGHIRNQRGDYSHTFSRKDLQAELNLLFEKQKEFGNPHVSGGLKEGIETLLMTQRPALSGDAVQKMLGHCTFEPAEPKAAKNTYTAERFIWLTKLNNLRILEQGSERPLTDTERATLMDEPYRKSKLTYAQARKLLSLEDTAFFKGLRYGKDNAEASTLMEMKAYHTISRALEKEGLKDKKSPLNLSPELQDEIGTAFSLFKTDEDITGRLKDRIQPEILEALLKHISFDKFVQISLKALRRIVPLMEQGKRYDEACAEIYGDHYGKKNTEEKIYLPPIPADEIRNPVVLRALSQARKVINGVVRRYGSPARIHIETAREVGKSFKDRKEIEKRQEENRKDREKAAAKFREYFPNFVGEPKSKDILKLRLYEQQHGKCLYSGKEINLGRLNEKGYVEIDHALPFSRTWDDSFNNKVLVLGSENQNKGNQTPYEYFNGKDNSREWQEFKARVETSRFPRSKKQRILLQKFDEDGFKERNLNDTRYVNRFLCQFVADRMRLTGKGKKRVFASNGQITNLLRGFWGLRKVRAENDRHHALDAVVVACSTVAMQQKITRFVRYKEMNAFDGKTIDKETGEVLHQKTHFPQPWEFFAQEVMIRVFGKPDGKPEFEEADTPEKLRTLLAEKLSSRPEAVHEYVTPLFVSRAPNRKMSGQGHMETVKSAKRLDEGVSVLRVPLTQLKLKDLEKMVNREREPKLYEALKARLEAHKDDPAKAFAEPFYKYDKAGNRTQQVKAVRVEQVQKTGVWVRNHNGIADNATMVRVDVFEKGDKYYLVPIYSWQVAKGILPDRAVVAYADEEDWTVIDESFRFKFVLYSNDLIKVQLKKDSFLGYFSGLDRATGAISLREHDLEKSKGKDGMHRIGVKTALSFQKYQIDEMGKEIRPCRLKKRPPVR

SEQ ID NO: 568 - protein, 1082 aa, Neisseria meningitidis
MAAFKPNPINYILGLDIGIASVGWAMVEIDEEENPIRLIDLGVRVFERAEVPKTGDSLAMARRLARSVRRLTRRRAHRLLRARRLLKREGVLQAADFDENGLIKSLPNTPWQLRAAALDRKLTPLEWSAVLLHLIKHRGYLSQRKNEGETADKELGALLKGVADNAHALQTGDFRTPAELALNKFEKECGHIRNQRGDYSHTFSRKDLQAELNLLFEKQKEFGNPHVSGGLKEGIETLLMTQRPALSGDAVQKMLGHCTFEPAEPKAAKNTYTAERFIWLTKLNNLRILEQGSERPLTDTERATLMDEPYRKSKLTYAQARKLLGLEDTAFFKGLRYGKDNAEASTLMEMKAYHAISRALEKEGLKDKKSPLNLSPELQDEIGTAFSLFKTDEDITGRLKDRIQPEILEALLKHISFDKFVQISLKALRRIVPLMEQGKRYDEACAEIYGDHYGKKNTEEKIYLPPIPADEIRNPVVLRALSQARKVINGVVRRYGSPARIHIETAREVGKSFKDRKEIEKRQEENRKDREKAAAKFREYFPNFVGEPKSKDILKLRLYEQQHGKCLYSGKEINLVRLNEKGYVEIDHALPFSRTWDDSFNNKVLVLGSENQNKGNQTPYEYFNGKDNSREWQEFKARVETSRFPRSKKQRILLQKFDEEGFKERNLNDTRYVNRFLCQFVADHILLTGKGKRRVFASNGQITNLLRGFWGLRKVRAENDRHHALDAVVVACSTVAMQQKITRFVRYKEMNAFDGKTIDKETGEVLHQKTHFPQPWEFFAQEVMIRVFGKPDGKPEFEEADTPEKLRTLLAEKLSSRPEAVHEYVTPLFVSRAPNRKMSGQGHMETVKSAKRLDEGVSVLRVPLTQLKLKDLEKMVNREREPKLYEALKARLEAHKDDPAKAFAEPFYKYDKAGNRTQQVKAVRVEQVQKTGVWVRNHNGIADNATMVRVDVFEKGGKYYLVPIYSWQVAKGILPDRAVVQGKDEEDWQLIDDSFNFKFSLHPNDLVEVITKKARMFGYFASCHRGTGNINIRIHDLDHKIGKNGILEGIGVKTALSFQKYQIDELGKEIRPCRLKKRPPVR

SEQ ID NO: 569 - protein, 1081 aa, Neisseria meningitidis
MAAFKPNPINYILGLDIGIASVGWAMVEIDEEENPIRLIDLGVRVFERAEVPKTGDSLAMARRLARSVRRLTRRRAHRLLRARRLLKREGVLQAADFDENGLIKSLPNTPWQLRAAALDRKLTPLEWSAVLLHLIKHRGYLSQRKNEGETADKELGALLKGVADNAHALQTGDFRTPAELALNKFEKESGHIRNQRGDYSHTFSRKDLQAELILLFEKQKEFGNPHVSGGLKEGIETLLMTQRPALSGDAVQKMLGHCTFEPAEPKAAKNTYTAERFIWLTKLNNLRILEQGSERPLTDTERATLMDEPYRKSKLTYAQARKLLGLEDTAFFKGLRYGKDNAEASTLMEMKAYHAISRALEKEGLKDKKSPLNLSPELQDEIGTAFSLFKTDEDITGRLKDRVQPEILEALLKHISFDKFVQISLKALRRIVPLMEQGKRYDEACAEIYGDHYGKKNTEEEIYLPPITADEIRNPVVLRALSQARKVINAVVRRYGSPARIHIETAREVGKSFKDRKEIEKRQEENRKDREKAAAKFREYFPNFVGEPKSKDILKLRLYEQQHGKCLYSGKEINLVRLNEKGYVEIDHALPFSRTWDDSFNNKVLVLGSENQNKGNQTPYEYFNGKENSREWQEFKARVETSRFPRSKKQRILLQKFDEDGFKERNLNDTRYVNRFLCQFVADRMRLTGKGKKRVFASNGQITNLLRGFWGLHKVRAENDRHHALDAVVVACSTIAMQQKITRFVRYKEMNAFDGKTIDKETGEVLHQKAHFPQPWEFFAQEVMIRVFGKPDGKPEFEEADTPEKLRTLLAEKLSSRPEAVHEYVTPLFVSRAPNRKMSGQGHMETVKSAKRLDEGISVLRVPLTQLKLKDLEKMVNRAREPKLYEALKARLEAHKDDPAKAFAEPFYKYDKAGNRTQQVKAVRVEQVQKTGVWVRNHNGIADNATMVRVDVFEKAGKYYLVPIYSWQVAKGILPDRAVVAYADEEDWTVIDESFRFKFVLYSNDLIKVQLKKDSFLGYFSGLDRATGAISLREHDLEKSKGKDGMHRIGVKTALSFQKYQIDEMGKEIRPCRLKKRPPVR

SEQ ID NO: 570 - protein, 1082 aa, Neisseria meningitidis
MAAFKPNPINYILGLDIGIASVGWAMVEIDEEENPIRLIDLGVRVFERAEVPKTGDSLAMARRLARSVRRLTRRRAHRLLRARRLLKREGVLQAADFDENGLIKSLPNTPWQLRAAALDRKLTPLEWSAVLLHLIKHRGYLSQRKNEGETADKELGALLKGVANNAHALQTGDFRTPAELALNKFEKESGHIRNQRGDYSHTFSRKDLQAELILLFEKQKEFGNPHVSGGLKEGIETLLMTQRPALSGDAVQKMLGHCTFEPAEPKAAKNTYTAERFIWLTKLNNLRILEQGSERPLTDTERATLMDEPYRKSKLTYAQARKLLGLEDTAFFKGLRYGKDNAEASTLMEMKAYHAISRALEKEGLKDKKSPLNLSSELQDEIGTAFSLFKTDEDITGRLKDRVQPEILEALLKHISFDKFVQISLKALRRIVPLMEQGKRYDEACAEIYGDHYGKKNTEEKIYLPPIPADKIRNPVVLRALSQARKVINGVVRRYGSPARIHIETAREVGKSFKDRKEIEKRQEENRKDREKAAAKFREYFPNFVGEPKSKDILKLRLYEQQHGKCLYSGKEINLVRLNEKGYVEIDHALPFSRTWDDSFNNKVLVLGSENQNKGNQTPYEYFNGKDNSREWQEFKARVETSRFPRSKKQRILLQKFDEDGFKECNLNDTRYVNRFLCQFVADHILLTGKGKRRVFASNGQITNLLRGFWGLRKVRAENDRHHALDAVVVACSTVAMQQKITRFVRYKEMNAFDGKTIDKETGKVLHQKTHFPQPWEFFAQEVMIRVFGKPDGKPEFEEADTPEKLRTLLAEKLSSRPEAVHEYVTPLFVSRAPNRKMSGAHKDTLRSAKRFVKHNEKISVKRVWLTEIKLADLENMVNYKNGREIELYEALKARLEAYGGNAKQAFDPKDNPFYKKGGQLVKAVRVEKTQESGVLLNKKNAYTIADNGDMVRVDVFCKVDKKGKNQYFIVPIYAWQVAENILPDIDCKGYRIDDSYTFCFSLHKYDLIAFQKDEKSKVEFAYYINCDSSNGRFYLAWHDKGSKEQQFRISTQNLVLIQKYQVNELGKEIRPCRLKKRPPVR

SEQ ID NO: 571 - protein, 1082 aa, Neisseria meningitidis
MAAFKPNPINYILGLDIGIASVGWAMVEIDEEENPIRLIDLGVRVFERAEVPKTGDSLAMARRLARSVRRLTRRRAHRLLRARRLLKREGVLQAADFDENGLIKSLPNTPWQLRAAALDRKLTPLEWSAVLLHLIKHRGYLSQRKNEGETADKELGALLKGVANNAHALQTGDFRTPAELALNKFEKESGHIRNQRGDYSHTFSRKDLQAELILLFEKQKEFGNPHVSGGLKEGIETLLMTQRPALSGDAVQKMLGHCTFEPAEPKAAKNTYTAERFIWLTKLNNLRILEQGSERPLTDTERATLMDEPYRKSKLTYAQARKLLGLEDTAFFKGLRYGKDNAEASTLMEMKAYHAISRALEKEGLKDKKSPLNLSSELQDEIGTAFSLFKTDEDITGRLKDRVQPEILEALLKHISFDKFVQISLKALRRIVPLMEQGKRYDEACAEIYGDHYGKKNTEEKIYLPPIPADEIRNPVVLRALSQARKVINGVVRRYGSPARIHIETAREVGKSFKDRKEIEKRQEENRKDREKAAAKFREYFPNFVGEPKSKDILKLRLYEQQHGKCLYSGKEINLVRLNEKGYVEIDHALPFSRTWDDSFNNKVLVLGSENQNKGNQTPYEYFNGKDNSREWQEFKARVETSRFPRSKKQRILLQKFDEDGFKECNLNDTRYVNRFLCQFVADHILLTGKGKRRVFASNGQITNLLRGFWGLRKVRAENDRHHALDAVVVACSTVAMQQKITRFVRYKEMNAFDGKTIDKETGKVLHQKTHFPQPWEFFAQEVMIRVFGKPDGKPEFEEADTPEKLRTLLAEKLSSRPEAVHEYVTPLFVSRAPNRKMSGAHKDTLRSAKRFVKHNEKISVKRVWLTEIKLADLENMVNYKNGREIELYEALKARLEAYGGNAKQAFDPKDNPFYKKGGQLVKAVRVEKTQESGVLLNKKNAYTIADNGDMVRVDVFCKVDKKGKNQYFIVPIYAWQVAENILPDIDCKGYRIDDSYTFCFSLHKYDLIAFQKDEKSKVEFAYYINCDSSNGRFYLAWHDKGSKEQQFRISTQNLVLIQKYQVNELGKEIRPCRLKKRPPVR

SEQ ID NO: 572 - protein, 1082 aa, Neisseria meningitidis
MAAFKPNPINYILGLDIGIASVGWAMVEIDEEENPIRLIDLGVRVFERAEVPKTGDSLAMARRLARSVRRLTRRRAHRLLRTRRLLKREGVLQAANFDENGLIKSLPNTLWQLRAAALDRKLTPLEWSAVLLHLIKHRGYLSQRKNEGETADKELGALLKGVAGNAHALQTGDFRTPAELALNKFEKESGHIRNQRGDYSHTFSRKDLQAELNLLFEKQKEFGNPHISDGLKEGIETLLMTQRPALSGDAVQKMLGHCTFEPTEPKAAKNTYTTERFIWLTKLNNLRILEQGSERPLTDTERATLMDEPYRKSKLTYAQARKLLELDDIAFFKGLRYGKDNAEASTLMEMKAYHAISRALEKEGLKDKKSPLNLSPELQDEIGTAFSLFKTDEDITGRLKDRIQPEILEALLKHINFDKFVQISLKALRRIVPLMEQGKRYDEACAEIYGDHYGKKNTEEKIDLPPIPADEIHNPVVLRALSQARKVINGVVRRYGSPARIHIETAREVGKSFKDRKEIEKRQEENRKDREKAAAKFREYFPNFVGEPKSKDILKLRLYEQQHGKCLYSGKEINLGRLNEKGYVEIDHALPFSRTWDDSFNNKVLVLGSENQNKGNQTPYEYFNGKDNSREWQEFKARVETSRFPRSKKQRILLQKFDEDGFKERNLNDTRYVNRFLCQFVADRMRLTGKGKKRVFASNGQITNLLRGFWGLRKVRAENDRHHALDAVVVACSTVAMQQKITRFVRYKEMNAFDGKTIDKETGEVLHQKTHFPQPWEFFAQEVMIRVFGKPDGKPEFEEADTPEKLRTLLTEKLSSRPEAVHEYVTPLFVSRAPNRKMSGQGHMETVKSAKRLDEGISVLRVPLTQLKLKDLEKMVNREREPKLYEALKARLEAHKDDPAKAFAEPFYKYDKAGNRTQQVKAMRVEQVQKTGVWVRNHNGIADNATMVRVDVFEKGDKYYLVPIYSWQVAKGILPDRAVVQGKDEEDWQLIDDSFNFKFSLHPNDLVEVITKKARMFGYFASCHRGTGNINIRIHDLDHKIGKNGILEGIGVKTALSFQKYQIDELGKEIRPCRLKKRPPVR

SEQ ID NO: 573 - protein, 1082 aa, Neisseria meningitidis
MAAFKPNPINYILGLDIGIASVGWAMVEIDEEENPIRLIDLSVRVFERAEVPKTGDSLAMARRLARSVRRLTRRRAHRLLRARRLLKREGVLQAADFDENGLIKSLPNTPWQLRAAALDRKLTPLEWSAVLLHLIKHRGYLSQRKNEGETADKELGALLKGVADNAHALQTGDFRTPAELALNKFEKESGHIRNQRGDYSHTFSRKDLQAELILLFEKQKEFGNPHVSGGLKEGIETLLMTQRPALSGDAVQKMLGHCTFEPAEPKAAKNTYTAERFVWLTKLNNLRILEQGSERPLTDTERATLMDEPYRKSKLTYAQARKLLGLEDTAFFKGLRYGKDNAEASTLMEMKAYHAISRALEKEGLKDKKSPLRLSPELQDEIGTAFSLFKTDEDITGRLKDRVQPEILEALLKHISFDKFVQISLKALRRIVPLMEQGKRYDEACAEIYGDHYGKKNAEEKIYLPPIPADEIRNPVVLRALSQARKVINGVVRRYGSPARIHIETAREVGKSFKDRKEIEKRQEENRKDREKAAAKFREYFPNFVGEPKSKDILKLRLYEQQHGKCLYSGKEINLGRLNEKGYVEIDHALPFSRTWDDSFNNKVLVLGSENQNKGNQTPYEYFNGKDNSREWQEFKARVETSRFPRSKKQRILLQKFDEDGFKERNLNDTRYVNRFLCQFVADRMRLTGKGKKRVFASNGQITNLLRGFWGLRKVRAENDRHHALDAVVVACSTVAMQQKITRFVRYKEMNAFDGKTIDKETGEVLHQKTHFPQPWEFFAQEVMIRVFGKPDGKPEFEEADTPEKLRTLLAEKLSSRPEAVHEYVTPLFVSRAPNRKMSGQGHMETVKSAKRLDEGVSVLRVPLTQLKLKDLEKMVNREREPKLYEALKARLEAHKDDPAKAFAEPFYKYDKAGNRTQQVKAVRVEQVQKTGVWVRNHNGIADNATMVRVDVFEKGDKYYLVPIYSWQVAKGILPDRAVVQGKDEEDWQLIDDSFNFKFSLHPNDLVEVITKKARMFGYFASCHRGTGNINIRIHDLDHKIGKNGILEGIGVKTALSFQKYQIDELGKEIRPCRLKKRPPVR

SEQ ID NO: 574 - protein, 1082 aa, Neisseria meningitidis
MAAFKPNSINYILGLDIGIASVGWAMVEIDEEENPIRLIDLGVRVFERAEVPKTGDSLAMARRLARSVRRLTRRRAHRLLRTRRLLKREGVLQAANFDENGLIKSLPNTPWQLRAAALDRKLTPLEWSAVLLHLIKHRGYLSQRKNEGETADKELGALLKGVAGNAHALQTGDFRTPAELALNKFEKESGHIRNQRSDYSHTFSRKDLQAELILLFEKQKEFGNPHVSGGLKEGIETLLMTQRPALSGDAVQKMLGHCTFEPAEPKAAKNTYTAERFIWLTKLNNLRILEQGSERPLTDTERATLMDEPYRKSKLTYAQARKLLGLEDTAFFKGLRYGKDNAEASTLMEMKAYHAISRALEKEGLKDKKSPLNLSPELQDEIGTAFSLFKTDEDITGRLKDRIQPEILEALLKHISFDKFVQISLKALRRIVPLMEQGKRYDEACAEIYGDHYGKKNTEEKIYLPPIPADEIRNPVVLRALSQARKVINGVVRRYGSPARIHIETAREVGKSFKDRKEIEKRQEENRKDREKAAAKFREYFPNFVGEPKSKDILKLRLYEQQHGKCLYSGKEINLGRLNEKGYVEIDHALPFSRTWDDSFNNKVLVLGSENQNKGNQTPYEYFNGKDNSREWQEFKARVETSRFPRSKKQRILLQKFDEDGFKERNLNDTRYVNRFLCQFVADRMRLTGKGKKRVFASNGQITNLLRGFWGLRKVRAENDRHHALDAVVVACSTVAMQQKITRFVRYKEMNAFDGKTIDKETGEVLHQKTHFPQPWEFFAQEVMIRVFGKPDGKPEFEEADTLEKLRTLLAEKLSSRPEAVHEYVTPLFVSRAPNRKMSGQGHMETVKSAKRLDEGVSVLRVPLTQLKLKDLEKMVNREREPKLYEALKARLEAHKDDPAKAFAEPFYKYDKAGNRTQQVKAVRVEQVQKTGVWVRNHNGIADNATMVRVDVFEKGDKYYLVPIYSWQVAKGILPDRAVVQGKDEEDWQLIDDSFNFKFSLHPNDLVEVITKKARMFGYFASCHRGTGNINIRIHDLDHKIGKNGILEGIGVKTALSFQKYQIDELGKEIRPCRLKKRPPVR

SEQ ID NO: 575 - protein, 67 aa, Neisseria meningitidis
MFGYFASCHRGTGNINIRIHDLDHKIGKNGILEGIGVKTALSFQKYQIDELGKEIRPCRLKKRPPVR

SEQ ID NO: 576 - protein, 220 aa, Neisseria mucosa
MRHIFSDGLKEGIETLLMTQRPALSGDAVQKMLGHCTFEPTEPKAAKNTYTAERFIWLTKLNNLRILEQGSERPLTNTERATLMDEPYRKSKLTYAQARKLLGLKDTAFFKGLRYGKDNAEASTLMEMKAYHAISRALEKEGLKDKKSPLNLSPELQDEIGTAFSLFKTDEDITGRLKTELTPASNKTLSRPFTVKSASNGSTSAPWLPSTKWFLHFKPA

SEQ ID NO: 577 - protein, 392 aa, Neisseria sp.
MAPFTLKPLNYILGLDIGIASVGWAVVETDSDVLPYRLIDVGVRTFDRAEVPKTGESPAAARRLARSVRRMIRRRAHRMLRARRLLKREGMLQAADFDAHGLVENLPVNPWQLRVDALSRKLMPLEWAAVLLHMVKHRGYLSQRKNERNSSDKELGALLSGVAANSEALQGGDFRTPAELAVNKFEKESGHIRNQRGDYSHTFNRKDVQAELVLLFEKQKEYGNPYISDGLLTGVEDLLMTQRAALSGDAVQKMLGRCTFEPEEYKAAKNTYSAERFVWLTKLNNLRILDQGSERPLTDSERAKLMDEPYKKTKLTYAQVRRLLELDDTAFFKGLRYSKDNAESATLMEMKAYHSISGALEKAGLKNKKIAAGLIARIAGRNRRGVFAIQNR

SEQ ID NO: 578 - protein, 701 aa, Neisseria sp.
MQDEIGEAFSLFKTDEDIRGRLKGKLPDEQLDALLEYVSFDKFVQLSLKALRKILPLMEQGKRYDEACAEIYGDHYGIKDDKQAQFLPPVSADEIRNPVVLRALSQARKVVNAVVRRYGSPARVHIETAREVGKSFLDRKKIEKRQEENRKDRERSIAKFREYFPNFVGEPKAKDILKMRLYEQQQGQCLYSGKAIDLRRLNEKGYVEIDHALPFSRTWDDSFNNKVLVLAGENQNKRNQTPFEWLGGDEKRWREFTARVEHCRFPRSKKQRILMQKLDEKDFKERNLNDTRYVNRFLCNFIAQNMLLTGEDKNRVFASNGQITNLLRGMWGLKKVRESNDRHHALDAVVVACSTVAMQQKITNYVRQKEMNVFDGEMVDKTTGEVSRLHFPQPWDFFRQEVMMRVFGKPDTPSENNEEADTPEKLRALLADKLSSRPEAVHEAVTPLFVSRAPSRKMSGQGHMETIKSAKRLSEGKSVLRVPLTQLTPKLLENMVNREREPQLYEDLLGRLNAHGGDPAKAFAAPFFKRDKAGNPTQQVKAVRVEDVQKSGVIVREGNGVADNATMVRVDVFEKGGKYYLMPIYTWQAAKGILPNKAVIAHTDEANWQEMDTSFTFKFALYPNDLVLASLKKETYFGYFAGLDRSTGNISLRVHDLEKSKGKDGVYRIGVKTALSFQKYQVDELGKTIRPCRLKKRPPVR

SEQ ID NO: 579 - protein, 1089 aa, Neisseria sp.
MTAFKPNPLNYILGLDIGIASVGWAMVEIDDKENPVRLIDLGVRVFERAEMPKTGDSLAAARRLARSVRRLTRRRAHRLLRARRLLKHEGVLKPEDFDENGLVKPLPYIPKQPRNTPWQLRAAALDRKLTPLEWAAVLLHLVKHRGYLSQRKNEGETDDKELGALLKGVADNTHALQAGNFRTPAELALNKFEKESGHIRNQRGDYSHTFSRKDLQAELVLLFEKQKEFGNPYVSDDLKNGIENLLMTQRPALSGDAIQKMLGHCTFEPAEPKAAKNTYTAERFIWLTKLNNLRILNQGNERPLTDAERTTLMDEPYKKSKLTYAQARKLLDLDDTAFFKGLRYGKDNAESATLMEMKAYHAISRALEKEGLKDKKSPLSLSPELQDEIGTAFSLFKTDEEITGRLKGCLQPEILDALLKHISFDKFVQISLKALRRIVPLMEQGKRYDEACAEIYGDHHGRRNSEETLYLPPIPADEIRNPVVLRALSQARKVINGVGRRYGSPARIHIETAREVGKSFKDRKEIEKRQEENRKDREKAAAEFQEYFPNFVGEPKSKDILKLRLYRQQNCKCLYSGKEINLGRLNEKGYVEIDHALPFSRTWDDSFNNKVLVLGSENQNKGNRTPYEYLNGKDNSREWQEFKARVETSRFPHSKKQRILLQKFDEEGFKERNLNDTRYVNRFLCKFVADHMQLTGKGKRRVFASNGQITNLLRGFWGLRKVRAENDRHHALDAVVVACSTVAMQQRITRFVRYKEMNAFDGKTVDKETGEVLHQKTHFPQPWEFFAQEVMIRVFGKPDGKPELEEADTPEKLRALLAEKLSSRPEAVHEYVAPLFVSRAPNRKMSGQGHMETIKSPKRLDEGISVVRVPLTQLKLKDLEKMVNREREPKLYEALKARLEAHKDDPAKAFAEPFYKQDKAGNRTQQVKAVRIEQVQKTGVWVRNQNGIADNATMVRVDVFEKGGKYYLVPIYSWQVAKGILPDKAIIAFKDEEEWQLIDDSFNFKFPLHPNDLVEVITKKARIFGYFASCHRGTGNINIRIHDLDNKVGKNGILEGIGVKTALSFQKYQIDELGKEIRPCRLKKRPPVR

SEQ ID NO: 580 - protein, 1097 aa, Neisseria wadsworthii
MKKQPQRYILGLDLGIASVGWALILVDGAENPVGLLDCGVRTFERAEVPKTGDSLALARRQARSVRRLIRRRAHRLLRLRRLLKREGILSAADFNSDGLPNLPIDAWQLRVAGLERKLTNQEWAAVLLHLVKHRGYLSQRKSETQTENKELGRLLAGVAENSKLLSESSEQYRTPAELAVKLFAEQSGHLRNKGGEYTHTFNRLDLQKELHLLFERQYALGNPFASAELQSKVDELLMTQRSALQGEAVLKMLGKCTFEPSEYKAAKNTYSAERFIWLTKLNNLRILYNGEERALDEGDRKKLLDEPYKKAKLTYKQVRSILNLPESAVFKGLRYGKDSDGLKAENGTLMEMKAYHKIRTILDKAGLKGEWENRIRNPEILDKIGTAFSLYKTDEDIQAALADLRLPENVLDALLAGLNFDKFIQLSLKALRNILPLMERGIRYDEACKEVYGDHRALAESKNQVLLPPIPADEIRNPVVLRTLTQARKVINAIIRRYGSPQRVHIETARELGKSKQERDKIDRKNKENQNDRNRLASDIRKHFNFEPTPKDILKLRLYEQQHGKCLYSDLREEKGECLYTGNVIELHRLFEDGYVEIDHALPLSRTWDNSLNNKVLVLKSSNQNKGNKTPYEWLDGANNSRRWREFQARVQGCHFPYVKKQRIQTAKLDSKAEQGFLERNLNDTRYISKFMCQFITANLRLAETSNALMEEVAGENPYWKERKRQRVFAPSGSIIALLRGLWGLKKVREDNDRHHALDAIVVACSTVSMQQKITKAMQRRETLETVDSETGEVKTRIPQPWDFFRQEVMIRVFSDSPREELAEKLNSRPEALHDFVSPLFVSRAPNRKMTGQGHLETVKSAKRLSENISVVRKPLTALKLKDIENIVGYPDREPALYQALRERLLAHKDDPVKAFADKPFYKPAKDGGQGSLVKAVRIIENTKHGLKIRNGITDTNGDMVRTDVYQKTDKKGKRQYFIVPVYAWQVEKNELPTVDCKGYEIDDNYEFCFSLYKYDLIEIQNPNDINQELRAYYINCDSSDGRFWLAYHDKSAKEQQFRISTQNQPIIKKYQVDTLGKEIRLCKAEKRTALNGKKKK

SEQ ID NO: 581 - protein, 1426 aa, Niabella soli
MPRKNILGLDLGTTSIGFAKIIEDDDYQCSSVELIGVRVNPLTTDEQTNFEKGKPVSVNADRTLKRGMRRNLDRYQLRRDYLIEILRTHHIITADTKLAEDGKNTTHTTYALRALAATAEIPLEAFVRVLLAINKKRGYKSSRKAKNEDEGQLIDGMAIARRLYEESLTPGQFSYQLLKEGKKYLPDFYRSDLNTELNKVWNFQKQFYPEILTDEFKRHLEGKGQRATAVAFWGQHGFSMAENKGSREEKKLHAYKWRSEAAHKQLTKEEVAFVITEINNDLNKSSGYLGAISDRSKELFFNKQTVGQYLHQQLKENPHTRLKGQVFYRQDYLDEFETIWEMQAKFYSALTLELKEEVRDVVIFYQRKLKSQMGLISLCEFESKEIEIEKNGEKAKKRIGLRVAPKSSPLFQEFKIWQVLNNLEFRNKKTKEVFVPEMAAKQQLFDELNIKGNLLASEAIKILGYKTKDWEANYHTLEGNRTNKSLYDAWLKILELEGYDENLLKLSGSDDIDVSKIEKPALEIRQMVLAVFEVLGISGAILDFDAEADGKAFEQQPAYQLWHLLYSAEDDGKKYSQEDIFTYGHDNIGLKKKLCEKFGFRPEHTKILVNVVFSDDYGNLSSKAMRRIYPFIKELTYDKACAEAGYRHSAASLTKEEIAARPLQNRLDLLKKNELRSPVVEKILNQMVNVVNTLVDDENQNRKARGLSEDFHFDEIRIELARELKKNAKERAEMTTNINTAKQSHEKIIRILQTEFGVPNPSRNDIVRYKLYEELKNNGYKDLYTNTYISRDILFSKQIDVDHIIPQMSLFDDSFSNKTVVFRKDNQDKGNKTAYDYILGKYGEQALEEYISRITSLFELGKKNKEEGIGKAKFQKLQKRLVDIGDGFIERDLRESQYIAKKANNMLYAICRSVVSTSGEITARLREDWDLVNVMQEINLPKFRALGLTEMVEKKDGAQKERITDWTKRNDHRHHAMDALAIAFTRHSHIQYLNHLNARKDEANKWHPVVSKIEEKETVLIYDDLGNRKRKFKAPMPNFREVVKEHLENVLISHKAKNKVVTKNKNKIKTVRGEKVKTELTPRGQLHKETIYGRYRYYESKEEKIGPKFDAEMIGMVTNPQYKKLLLERLAANGNDPKKAFWGKNALNKNPLYVDEARQELLPEKILLRWLNDDYSIRKDVTPENLKDIKTIEKILDKGVKKILLKRLADFGNDPKKAFSDLDKNPIWQNEAKRIAIKRVTISGIKNAAPLHHKKDHLGNDILDEKGKQIPSSFVSTGNNHHVAIYRDAEGNLQERVVSLFDAVQLVNGGEPVIDKEYNKGIGWQFLFTMKQNEMFVFPDEKTGFNPREVDLLSSGNRKLISPNLFRVQKLASKNYFFRHHLETSVEEKKELKNIAYKPQLGLNALSNIVKVRINHIGEIVSVGEY

SEQ ID NO: 582 - protein, 79 aa, Nitritalea halalkaliphila
MPLRLPERVYKMISSTGAECHFLPVNVSSLIKGYDAKSKLGEFGSQNKQEVTSDSFIRVKERCYKLEINRLGIPLNRLK

SEQ ID NO: 583 - protein, 1498 aa, Odoribacter laneus
METTLGIDLGTNSIGLALVDQEEHQILYSGVRIFPEGINKDTIGLGEKEESRNATRRAKRQMRRQYFRKKLRKAKLLELLIAYDMCPLKPEDVRRWKNWDKQQKSTVRQFPDTPAFREWLKQNPYELRKQAVTEDVTRPELGRILYQMIQRRGFLSSRKGKEEGKIFTGKDRMVGIDETRKNLQKQTLGAYLYDIAPKNGEKYRFRTERVRARYTLRDMYIREFEIIWQRQAGHLGLAHEQATRKKNIFLEGSATNVRNSKLITHLQAKYGRGHVLIEDTRITVTFQLPLKEVLGGKIEIEEEQLKFKSNESVLFWQRPLRSQKSLLSKCVFEGRNFYDPVHQKWIIAGPTPAPLSHPEFEEFRAYQFINNIIYGKNEHLTAIQREAVFELMCTESKDFNFEKIPKHLKLFEKFNFDDTTKVPACTTISQLRKLFPHPVWEEKREEIWHCFYFYDDNTLLFEKLQKDYALQTNDLEKIKKIRLSESYGNVSLKAIRRINPYLKKGYAYSTAVLLGGIRNSFGKRFEYFKEYEPEIEKAVCRILKEKNAEGEVIRKIKDYLVHNRFGFAKNDRAFQKLYHHSQAITTQAQKERLPETGNLRNPIVQQGLNELRRTVNKLLATCREKYGPSFKFDHIHVEMGRELRSSKTEREKQSRQIRENEKKNEAAKVKLAEYGLKAYRDNIQKYLLYKEIEEKGGTVCCPYTGKTLNISHTLGSDNSVQIEHIIPYSISLDDSLANKTLCDATFNREKGELTPYDFYQKDPSPEKWGASSWEEIEDRAFRLLPYAKAQRFIRRKPQESNEFISRQLNDTRYISKKAVEYLSAICSDVKAFPGQLTAELRHLWGLNNILQSAPDITFPLPVSATENHREYYVITNEQNEVIRLFPKQGETPRTEKGELLLTGEVERKVFRCKGMQEFQTDVSDGKYWRRIKLSSSVTWSPLFAPKPISADGQIVLKGRIEKGVFVCNQLKQKLKTGLPDGSYWISLPVISQTFKEGESVNNSKLTSQQVQLFGRVREGIFRCHNYQCPASGADGNFWCTLDTDTAQPAFTPIKNAPPGVGGGQIILTGDVDDKGIFHADDDLHYELPASLPKGKYYGIFTVESCDPTLIPIELSAPKTSKGENLIEGNIWVDEHTGEVRFDPKKNREDQRHHAIDAIVIALSSQSLFQRLSTYNARRENKKRGLDSTEHFPSPWPGFAQDVRQSVVPLLVSYKQNPKTLCKISKTLYKDGKKIHSCGNAVRGQLHKETVYGQRTAPGATEKSYHIRKDIRELKTSKHIGKVVDITIRQMLLKHLQENYHIDITQEFNIPSNAFFKEGVYRIFLPNKHGEPVPIKKIRMKEELGNAERLKDNINQYVNPRNNHHVMIYQDADGNLKEEIVSFWSVIERQNQGQPIYQLPREGRNIVSILQINDTFLIGLKEEEPEVYRNDLSTLSKHLYRVQKLSGMYYTFRHHLASTLNNEREEFRIQSLEAWKRANPVKVQIDEIGRITFLNGPLC

SEQ ID NO: 584 - protein, 1389 aa, Oenococcus kitaharae; identical to SEQ ID NO: 241

SEQ ID NO: 585 - protein, 1535 aa, Ornithobacterium rhinotracheale
MNTILGLDLGTNSIGWALIKVLNDKTRLPLEIIDLGVVVIPTDQRTLDKFSKGESISKTAERTKQKGVRKLYERKKLRRERLHRVLNILGFLPEHYSKKIDFKKHLGQFFGNSQPKISYVENDHGKHEFIFMDSYREMLKEFSKHNIKNVPYDWTIYYLRKKALSQKISKEELAWVILNFNKKRGYYQFRDDNADENKENKIEKYYALKVTNVKKEDAQNYTITLENGWIYKNKSKISLLDWVGSTKEFISTEKFDNKGNIIKKKNGEDDRTLKLVDSEKDWIAIKKSTEDRIENYGKTVGTYLYEHLLKDPNQKLNGELINIIDRKFYKNELKQILEKQKEFHPELLNEDLFQKSIIELYPKNSTRQKELKNKDLCYLLIDDVIYYQRDLKKKNSTINKCSFESREYYLNGEKQIQKINCIAKSKPLYQEFRTLQFIKNLKVYEIIDGLEKDITSKLLPDFETKEHFFEWLNDKEKIDQLQLLSYKCFDLHDNVKNDLIAKGIKRPTEKAIRTELLEKYRWNYSKDNDRNFLLNETRFKILKYLKKVDKKLTLTNEQIESLWLLLYSAKDERELKNGLQKFSEKNKLPKKFSDIFISFPPFKKEYGAYSEKALKKLLSLVRFGKYWSFNKIDNNIQNKIMNILNGEVDDSISDRVREKTILLQDKNDFQDLPLWLASYVAYNRFSEVSEIKYWDSPDKIEFLKQHSIGNPIVEKIINETLKLIKDIWVIHGKSCKNFFSEIHIELSREIKSSSKKRAQITNNNTKNQKLNNLIKSLLIEMASDTKYENVTPYSPSQQEILKIYDEGIYSKEENSEKIKEINKIRNNNKISKSDITKYKLWLEQGYISPYTGKIIPLTKLFTAKYQKEHIIPQTKFFDDSFNNKVICEAEVNKLKDNSLAMNFIKAKGGKAVKLSDGETVTILNQEEYKQLVRTSFKKNSIKLRNLLLEEIPDTFTKRQLNDTKYISKLVLSLLSNIVREKGELESTAKRIVSTNGQITSILRNDWGLNNIWNKLITPRFERLNNINKNKIYGNWENKKGKNVFQINYLNDNLSTLNTKRIDHRHHALDALIVACTTRNHINFLNNQYAKSRNQRHDLRAKLKRRETITTEGSKKQVFKDFIKPWESFTQDALKKLETTIVNFKVNKRIINKTINWYKKWEKQKDGTYKKIQKKQTKGDAWAIRKPLHIDTIYGIVCKKLPLKSALENYKNIIDENLKHKIKELKEVNKFDNNQIINFFKECNFIFEDNNIQKVEVYDFKDNRDKTILSSSRQLIDESFTPKKIGKVLDPTIRNILLKHLNSTKYNNKFDSDGNPIKPEKLAFSPEGLKDLNKNIKHLNNNKEHQPIKRVKLFETLGNKIKVGYTQQKNKKFAETATGTNLFLGIYSDNNKRDFKTIPLILAIQREKEGLNPCPDTDEKGNQLLFSLSPNELVFVPNNEERKNPNLVDFENLSKDQIDRIYKFVSCTGSEAYFVPSRTAKPIIENENGTNNKSQRIIEFNEKTSIKNEKNEPVLIKTICWKIEVNRLGKIIKVIK

SEQ ID NO: 586 - protein, 103 aa, Parabacteroides merdae
MIVYRLFYRFLFKATKLVNFVIHKELKRQIARTGKIKFHSGGCGCQSGNYKMQNFEKGKSITTNADRTLKRSMRRNLYRCKLRRDVLIELLKKVGFIPEKQWK

SEQ ID NO: 587 - protein, 82 aa, Parabacteroides merdae
MSIWKLQYPPLDLKIYNKFLVYSRVNPLTVDEMQNFEKGKSITTNADRTLKRSMRRNLQRYKLRRDVLIELLKKVGFMSEKQ

SEQ ID NO: 588 - protein, 84 aa, Parabacteroides merdae
MSIWKLQYPPLDLKIYNKFLVYSRVNPLTVDEMQNFEKGKSITTNADRTLKRSMRRNLYRCKLRRDVLIELLKKVGFIPEKQWK

SEQ ID NO: 589 - protein, 398 aa, Pasteurella bettyae
MLANENQNKGNLTPYEWLDGKNNSKRWQDFVARVQTCCFSHRKKQHILSHKLDEKSFIERNLNDTRYVARFLCNFIADNMLLTGKGKRKVFASNGQITALLRGRWGLQKVRDDNDRHHALDAVVIACSTVAMQQKITRFVKYEEGNVFSGERIDRETGEIIPLYFPTPWKFFKENVEIRIFSENPKLELENRLPDYPQYNHEFVQPLFVSRMPTRKMTGQGHMETIKSAKRLDEGISVLKVPLTQLKLADLENMVNRERELALYEALKERLELFGNDPAKAFIEPFYKKGGALVKAVRVKKVQKSGVLVRDGNGVADNALMVRVDVFTKGGKYFLVPIYTWQVAKGILPNKAVTANIDEIDWLEMDESYQFIFTMYPNDLVKVKLKKEEFFGYYGGLD

SEQ ID NO: 590 - protein, 610 aa, Pasteurella bettyae
MNMLKPLNYILGLDLGIGSVGWAVVEIDEQGNPLRLIDVGVRTFERAEVAKTGESLALARRLARSSRRLVKRRAARIKKAKRLLKAENILLSVDEILPNDVWQLRVKGLDHKLERQEWAAVLLHLLKRRGYLSQRKNESKSENKELGALLSGVVTNHQILQTDEYRTPAEIAVHKFQAEDGHIRNQRGDYTHTFSRLDLLAEMELLFQRQTELGNLHTSSKLLENLTALLMWQKPALAGEAILKMLGKCTFEPTEYKAAKNSYSAERFVWLTKLNNLRILEQGAERALTDSERFVLLDQPYEKAKLTYAQVRTLLKLSDEAIFKGVRYQGEDKKTVESKTTLMEMKAYHQIRKALDGADLKDEWNTLKNDSALLDEIGTAFSLYKTDDDISHYLGGKLSEKVLNVLLENLNFDKFIQLSLKALQKILPLMLQGQRYDEAVSAVYGDHYGKKSAESCRLLPAIPANEIHNPVVLRTLTQARKVINAVVRLYGSPARIHIETGRKVGKSYQDRKKLEKQQEENREQRESAVKKFKEYFPNFVGEPKGKDILKLRLYELQQSKCLYSGKSFDPNRLLEKGYVEVDHALPFSRTWDDSFNNKVCLPMKTRIKAI

SEQ ID NO: 591 - protein, 199 aa, Pasteurella multocida
MACATPSMQQKITRFIRFKEVHPYKIENRYEMVDQESGEIISPHFPEPWAYFRQEVNIRVFDNHPDTVLKEMLPDRPQANHQFVQPLFVSRAPTRKMSGQGHMETIKSAKRLAEGISVLRIPLTQLKPNLLENMVNKEREPALYAGLKARLAEFNQDPAKAFTTPFYKQGGQQVKAIRVEQVQKSGVLVRENNGVADNA

SEQ ID NO: 592 - protein, 63 aa, Pasteurella multocida
MQTTNLSYILGLDLGIASVGWAVVEINENEDPIGLIDVGVRIFERAEVPKTGESLALSRRLAR

SEQ ID NO: 593 - protein, 1058 aa, Pasteurella multocida
MQTTNLSYILGLDLGIASVGWAVVEINENEDPIGLIDVGVRIFERAEVPKTGESLALSRRLARSTRRLIRRRAHRLLLAKRFLKREGILSTTDLEKGLPNQAWELRVAGLERRLSAIEWGAVLLHLIKHRGYLSKRKNESQTNNKELGALLSGVAQNHQLLQSDDYRTPAELALKKFAKEEGHIRNQRGAYTHTFNRLDLLAELNLLFAQQHQFGNPHCKEHIQQYMTELLMWQKPALSGEAILKMLGKCTHEKNEFKAAKHTYSAERFVWLTKLNNLRILEDGAERALNEEERQLLINHPYEKSKLTYAQVRKLLGLSEQAIFKHLRYSKESAESATFMELKAWHAIRKALENQGLKDTWQDLAKKPDLLDEIGTAFSLYKTDEDIQQYLEGKLPDSVINALLVSLNFDKFIELSLKSLRKILPLMEQGKRYDQACHEIYGHHYGEKNQQISQLLPVIPTQEIRNPVVLRTLSQARKVINAIIRQYGSPARVHIETGRELGKSFKERREIQKQQEDNRTKRESAVQKFKELFSDFSSEPKSKDILKFRLYEQQHGKCLYSGKEINIHRLNEKGYVEIDHALPFSRTWDDSFNNKVLVLASENQNKGNQTPYEWLQGKINSERWKNFVALVLGSQCSAAKKQRLLTQVIDDNKFIDRNLNDTRYIARFLSNYIQENLLLVGKNKKNVFTPNGQITALLRSRWGLIKVRENNDRHHALDAIVVACATPSMQQKITRFIRFKEVHPYKIENRYEMVDQESGEIISPHFPEPWAYFRQEVNIRVFDNHPDTVLKEMLPDRPQANHQFVQPLFVSRAPTRKMSGQGHMETIKSAKRLAEGISVLRIPLTQLKPNLLENMVNKEREPALYVGLKARLAEFNQDPAKAFATPFYKQGGQQVKAIRVELVQKSGVLVRQGNGVADNAPGSIVRTDVFIKNNKFFLVPIYTWQVAKGILPNKAIVAHKNEDEWEEMDEGAKFKFSIFPNDLIELRTKTECFLGYYIGPDRHNGSISLREHDSEISKGNAGVYRVGVKLALSLEKYHIDELGKNRRICRPHQRRPVR

SEQ ID NO: 594 - protein, 1056 aa, Pasteurella multocida
MQTTNLSYILGLDLGIASVGWAVVEINENEDPIGLIDVGVRIFERAEVPKTGESLALSRRLARSTRRLIRRRARRLLLAKRFLKREGILSTTDLEKGLPNQAWELRVAGLERRLSAIEWGAVLLHLIKHRGYLSKRKNESQTNNKELGALLSGVAQNHQLLQSDDYRTPAELALKKFAKEEGHIRNQRGAYTHTFNRLDLLAELNLLFAQQHQFGNPHCKEHIQQYMTELLMWQKPALSGEAILKMLGKCTHEKNEFKAAKHTYSAERFVWLTKLNNLRILEDGAERALNEEERQLLINHPYEKSKLTYAQVRKLLGLSEQAIFKHLRYSKENAESATFMELKAWHAIRKALENQGLKDTWQDLAKKPDLLDEIGTAFSLYKTDEDIQQYLTNKVPNSVINALLVFLNFDKFIELALKSLRKILPLMEQGKRYDQACREIYGHHYGEANQKTSQLLPAIPAQEIRNPVVLRTLSQARKVINAIIRQYGSPARVHIETGRELGKSFKERREIQKQQEDNRTKRESAVQKFKELFSDFSSEPKSKDILKFRLYEQQHGKCLYSGKEINIHRLNEKGYVEIDHALPFSRTWDDSFNNKVLVLASENQNKGNQTPYEWLQGKINSERWKNFVALVLGSQCSAAKKQRLLTQVIDDNKFIDRNLNDTRYIARFLSNYIQENLLLVGKNKKNVFTPNGQITALLRSRWGLIKIRENNDRHHALDAIVVACATPSMQQKITRFIRFKEVHPYKIENRYEMVDQESGEIISPHFPEPWAYFRQEVNIRVFDNHPDTVLKEMLPDRPQANHQFVQPLFVSRAPTRKMSGQGHMETIKSAKRLAEGISVLRIPLTQLKPNLLENMVNKEREPALYAGLKARLAEFNQDPAKAFTTPFYKQGGQQVKAIRVEQVQKSGVLVRENNGVADNASIVRTDVFIKNNKFFLVPIYTWQVAKGILPNKAIVAHKNEDEWEEMDEGAKFKFSLFPNDLVELKTKKEYFFGYYIGLDRATGNISLKEHDGEISKGKDGVYRVGVKLALSFEKYQVDELGKNRQICRPQQRQPVR

SEQ ID NO: 595 - protein, 134 aa, Pasteurella multocida
MVNKEREPALYAGLKARLAEFNQDPAKAFTTPFYKQGGQQVKAIRVEQVQKSGVLVRENNGVADNASIVRTDVFIKNNKFFLVPIYTWQVAKGILPNKAIVAHKNEDEWEEMDEGAKFKFSLFPNDLVELKTKK

SEQ ID NO: 596 - protein, 53 aa, Pasteurella multocida
YSKENAESATFMELKAWHAIRKALENQGLKDTWQDLAKKPDLLDEIGTAFSLL

SEQ ID NO: 597 - protein, 1366 aa, Pediococcus acidilactici
MGDRKYNLGLDIGTSSIGFAAVDENNQPIRVKGKTAIGVRLFEEGKTAADRRGFRTTRRRLSRRRWRINLLNEIFDAHLAEVDPTFLARLKESNRSNLDPKKSFQGSLLFPERKDYQFYEEYPTIYHLRKALMEEDRKFDIREIYLAVHHIIKYRGNFLNGTPMRSFKVENIELDTLFDQLNQLYAEIVPDNELAFDLAQVADVKDVLSSTTIYKMDKKKQLVKMMLLPASNKALQSENKKIVTQFVNAILNYKFKLDVLLQVETDADWSLKLNDEGADDKLEEFTGDLDENRLEIIDLLQRLHNWFSLNEITKDGNSLSAAMVEKYENHHHHLGLLKKVIENHPDAKKAKALKETYTAYVGKTDDKTQNQDDFYKAVEKNLDDSPDAKEIKRLIQLDQFMPKQRTGQNGAIPHQLHQQELDQIIEKQSKYYPFLAEPNPNVKRRKDAPYKLDELIAFKIPYYVGPLVTPEEQAQNKENVFAWMKRKAAGPITPWNFDEKVDRMESANRFIRRMTTKDTYLFGEDVLPAESMIYQKFVVLNELNNLKINGRHLSLKDKQDVYNDLFKQQKTVSIKALQNYYVTKKKAATAPTVGGLADPKKFLSSLSTYIDFKNMFGERVNDPQFQEDLEQIVEWSTIFEDRGIFKAKLQALGWLSEKQIQQLVAKRYKGWGRLSKKLLTGLKNAEGYSILDEMWRSTENFMQIQTRPEFAALIQQANEKQFEGNDPNNVWENIESILGDAYTSPQNKKAIRQVVKVVQDIEKAVGNPPEKIAIEFTREAAANPQRTQSRLRTLEKLYESAEEVVDAGLTAELAEFKENKHVLSDKYYLYFTQLGRDVYTGDTISLDKLNDYDVDHILPQSFIKDDSLDNRVLTIRAVNNGKSDNVPAKMFGKKMGSFWRYLLDNGMISKRKYNNLITDPDNISKYAQKGFINRQLVETSQVIKLTANILNGIYDKDTEIIEVPAKMNSQMRKMFDLVKVREVNDYHHAFDAYLTIFIGKYLYKCYPKLRPYFVYGKFKKFGDNEDIEVGDGRFNFLNRIERLKNVTDPETGEILWSNVAPNETIKQIKKVYNYKFMLVSRETTTRRAELFNQTVYPKNYRGKLIPIKEDRPTDLYGGYSGNTDAYLAIVALEDKKKGKYFKVVGIPTRAAAKLEKLKQQDSQQYLQALHKVIAPQFTKSTKKGIKKTEFEIVLDKVHYRQLVQDGPVKMMLGSSTYKYNAKQLVLSEKALQVIADDRKFDETQKDDNLIAVYDEILSIVNQSFDLYDINGFRKKLNDNRDQFIDLPAETKYEGRKVVAHGKREMILEILKGLHANAAFGNLKPIGFSTAFGQLQVPNGIILSKNAILIHQSPSGLFERKIKLSDL

SEQ ID NO: 598 - protein, 1229 aa, Pediococcus acidilactici; identical to SEQ ID NO: 130

SEQ ID NO: 599 - protein, 270 aa, Pediococcus lolii
LFNQTIYSAKASKTMIPIKNDRPTKLYGGYSGNEDAYMSIIRLSDKKKTYKVVGISMRDASKLKAYENNAHEEYLKKLKEVIEQQFLDSGKKTKADFEIVIPKVNYHQRMQDGTKQFRIGSSKYVHNTKQLVLSEKTLKAIRNNKQYNGDAEKDLINAFDEILTIVNDSFSIFDIRSFRKKLNESRDKFVSLPVEDTKEKSKVIKGKRETLKQILIALHANGTSQDIPQLGLKSFGKMVKTGGLTLSENTALIHQSPSGLFEHKIKLSDL

SEQ ID NO: 600 - protein, 1016 aa, Pediococcus lolii
MNGIFDAHLAEVDPTFLARLKESNRSNLDPKKSFQGSLLFPERKDYQFYKEYPTIYHLRKALMEKDRKFDIREIYLAVHHIIKYRGNFLNGTPMRSFKVENIELDTLFDRLNQLYEEIIPDNELAFDLEQVADVKEVLSSTTIYKMDKKKQLVKMMLLPASNKALQSENKKIVTQFVNAILNYKFKLDVLLQVETDADWSLKLNDEGADDKLEEFTGDLDENRLEIIDLLQRLHNWFSLNEITKDGNSLSAAMVEKYKDHRHHLELLKKVIEDHSDAKKAKALKETYTAYVGKTDDKTQNKDDFYKAVEKNLDDSPEAKEIKRLIQLDQFMPKQRTGQNGAIPHQLHQQELDQIIEKQSKYYPFLAEPNPNVKRRKDAPYKLDELIAFKIPYYVGPLVTPEEQAQNKENVFAWMKRKAAGPITPWNFDEKVDRMESANRFIRRMTTKDTYLFGEDVLPAESMIYEKFVVLNELNNLKINGRHLSLKDKQDIYNDLFKQQKTVSIKALQNYYVTKKKAATAPTVGGLADPKKFLSSLSTYIDFKNMFGERVNDPQFQEDLEQIVEWSTIFEDRGIFKAKLQALGWLSEKQIQQLVAKRYKGWGRLSKKLLTGLKNAEGYSILDEMWHSTENFMQIQTRPEFAALIQQANEKQFEGNDPDNVWENIENILGDAYTSPQNKKAIRQVVKVVQDIEKAVGNPPEKIAIEFTREAAANPQRTQSRLRTLEKLYESAEEVVDAGLTAELAEFKENKHVLSDKYYLYFTQLGRDVYTGDTISLDRLNDYDVDHILPQSFIKDDSLDNRVLTIRAVNNGKSDNVPAKMFGKKMGSFWRYLLDNGMISKRKYNNLITDPDNISKYAQKGFINRQLVETSQVIKLTANILNGIYDKDTEIIEVPAKMNSQMRKMFDLVKVREVNDYHHAFDAYLTIFIGNYLYKCYPKLRPYFVYDNFKKFGNKEDIGHKRFNFLGKIERDKKVVAPETGEILWSNVAPNETIKQIKKVYDYKFMLTSHETYTKHG

SEQ ID NO: 601 - protein, 1333 aa, Planococcus antarcticus
MKNYTIGLDIGVASVGWVCIDENYKILNYNNRHAFGVHEFESAESAAGRRLKRGMRRRYNRRKKRLQLLQSLFDSYITDSGFFSKTDSQHFWKNNNEFENRSLTEVLSSLRISSRKYPTIYHLRSDLIESNKKMDLRLVYLALHNLVKYRGHFLQEGNWSEAASAEGMDDQLLELVTRYAELENLSPLDLSESQWKAAETLLLNRNLTKTDQSKELTAMFGKEYEPFCKLVAGLGVSLHQLFPSSEQALAYKETKTKVQLSNENVEEVMELLLEEESALLEAVQPFYQQVVLYELLKGETYVAKAKVSAFKQYQKDMASLKNLLDKTFGEKVYRSYFISDKNSQREYQKSHKVEVLCKLDQFNKEAKFAETFYKDLKKLLEDKSKTSIGTTEKDEMLRIIKAIDSNQFLQKQKGIQNAAIPHQNSLYEAEKILRNQQAHYPFITTEWIEKVKQILAFRIPYYIGPLVKDTTQSPFSWVERKGDAPITPWNFDEQIDKAASAEAFISRMRKTCTYLKGQEVLPKSSLTYERFEVLNELNGIQLRTTGAESDFRHRLSYEMKCWIIDNVFKQYKTVSTKRLLQELKKSPYADELYDEHTGEIKEVFGTQKENAFATSLSGYISMKSILGAVVDDNPAMTEELIYWIAVFEDREILHLKIQEKYPSITDVQRQKLALVKLPGWGRFSRLLIDGLPLDEQGQSVLDHMEQYSSVFMEVLKNKGFGLEKKIQKMNQHQVDGTKKIRYEDIEELAGSPALKRGIWRSVKIVEELVSIFGEPANIVLEVAREDGEKKRTKSRKDQWEELTKTTLKNDPDLKSFIGEIKSQGDQRFNEQRFWLYVTQQGKCLYTGKALDIQNLSMYEVDHILPQNFVKDDSLDNLALVMPEANQRKNQVGQNKMPLEIIEANQQYAMRTLWERLHELKLISSGKLGRLKKPSFDEVDKDKFIARQLVETRQIIKHVRDLLDERFSKSDIHLVKAGIVSKFRRFSEIPKIRDYNNKHHAMDALFAAALIQSILGKYGKNFLAFDLSKKDRQKQWRSVKGSNKEFFLFKNFGNLRLQSPVTGEEVSGVEYMKHVYFELPWQTTKMTQTGDGMFYKESIFSPKVKQAKYVSPKTEKFVHDEVKNHSICLVEFTFMKKEKEVQETKFIDLKVIEHHQFLKEPESQLAKFLAEKETNSPIIHARIIRTIPKYQKIWIEHFPYYFISTRELHNARQFEISYELMEKVKQLSERSSVEELKIVFGLLIDQMNDNYPIYTKSSIQDRVQKFVDTQLYDFKSFEIGFEELKKAVAANAQRSDTFGSRISKKPKPEEVAIGYESITGLKYRKPRSVVGTKR

SEQ ID NO: 602 - protein, 211 aa, Porphyromonas catoniae
MGKKVLGLDLGVGSIGWCLITLDKDEKPQSILGMGSRIVPLSADDATEFTQGKAITKNKMRTVARTIRKGMDRYQLRREALKKVLREHAMLPDEALIKLPLLELWELRARAATPGEQVSLTELGRVLLHINQKRGYKHAKADEAAEAETKKGKETGYVAQVKGRYQILKEKGLTIGQHFAGELRANQQTAPRGTYYTYRIKEQVYPRVRGV

SEQ ID NO: 603 - protein, 1009 aa, Porphyromonas catoniae
MRIIREAYIEEYDRIMAVQRVFYPELLTDALIGRIRDRIIFYQRPLKSCKQLVSFCEFEKKEKVIRVKHTNKEGVQELVEKTITIGPKVAPKSSPIFQVCKVWESIHNIRLYHPDGTERKLEQEEKQKLFDYLQRNDKLSLTTLRKELKIKPKDKLWCDKLLEKGIAGNTTAAILRKAFKGYEHYERLFRFDLVRRDSHEADEDGVIRPIIDESYQNEPLYKLWHILYSIEDRAEMRSALIGQLGIKAEDLDNGLMDALYKIDFVKQGYGNKSAKFICKLLPHLQEGKMYSEAAEAAGMRHSDSMTAQERDERNLLEEIPLLQKNALRQPVVEKVLNQMINLVNALKREHGEIDEVRVELARELKMSREEREKATKNNSSREKENKAIAERITEYGLTPTKSRIQKYRLWQESAESCIYCGKRVDVVQFLRGEETEVEHIIPKSILFDDSLSNKACACRSCNQEKGNRFAMEYIQAKGWEQDYIERVDSLFHDKKISYSKRQHLLMLPKDLPEDFIERHLRLSQYISREAQGILRKGIRLVSASEGGVTAKLRQLWGYDNILRDLNLERYKSMGETEVVTVEHRDGQRTDERIKDWSKRKDHRHHAIDALVVACTRQSYIQRLNRVNAEADRQEMDAFIKEQQQEHKLSKKEKLSLLENWLKEQPHFTTGEVKEHAEGILISFRPGKRTVSRGRNIYKRSGKTDVQRNVLIPRGALSEETVYGVISVDGENKVVCKYPLQKFLDTKETNVDKIADQAAEKIVDKVLREKIRERIKRYGKKEAFAEPLYLDEAQTQVVRSVRCFISKDQAKLIPLRYNDESEAVGFVAPGNNHHLALYRDASGKMRASVVSFFAAVERARYGIPMIVLNPRETREKARIIPDLPESIFSKLPEEDWVLEETLQEGEMVLLGMENDAIEEAIKKKDYSKLSRYLYRVQSLSYNDYKFCFHLETESEKKEKKKGEDKKRGEKAKNTAVMPPKRYRIRCLATYQEDLNPRKVKIDLLGRISLA

SEQ ID NO: 604 - protein, 1197 aa, Porphyromonas sp.
MLMSKHVLGLDLGVGSIGWCLIALDAQGDPAEILGMGSRVVPLNNATKAIEAFNAGAAFTASQERTARRTMRRGFARYQLRRYRLRRELEKVGMLPDAALIQLPLLELWELRERAATAGRRLTLPELGRVLCHINQKRGYRHVKSDAAAIVGDEGEKKKDSNSAYLAGIRANDEKLQAEHKTVGQYFAEQLRQNQSESPTGGISYRIKDQIFSRQCYIDEYDQIMAVQRVHYPDILTDEFIRMLRDEVIFMQRPLKSCKHLVSLCEFEKQERVMRVQQDDGKGGWQLVERRVKFGPKVAPKSSPLFQLCCIYEAVNNIRLTRPNGSPCDITPEERAKIVAHLQSSASLSFAALKKLLKEKALIADQLTSKSGLKGNSTRVALASALQPYPQYHHLLDMELETRMMTVQLTDEETGEVTEREVAVVTDSYVRKPLYRLWHILYSIEEREAMRRALITQLGMKEEDLDGGLLDQLYRLDFVKPGYGNKSAKFICKLLPQLQQGLGYSEACAAVGYRHSNSPTSEEITERTLLEKIPLLQRNELRQPLVEKILNQMINLVNALKAEYGIDEVRVELARELKMSREERERMARNNKDREERNKGVAAKIRECGLYPTKPRIQKYMLWKEAGRQCLYCGRSIEEEQCLREGGMEVEHIIPKSVLYDDSYGNKTCACRRCNKEKGNRTALEYIRAKGREAEYMKRINDLLKEKKISYSKHQRLRWLKEDIPSDFLERQLRLTQYISRQAMAILQQGIRRVSASEGGVTARLRSLWGYGKILHTLNLDRYDSMGETERVSREGEATEELHITNWSKRMDHRHHAIDALVVACTRQSYIQRLNRLSSEFGREDKKKEDQEAQEQQATETGRLSNLERWLTQRPHFSVRTVSDKVAEILISYRPGQRVVTRGRNIYRKKMADGREVSCVQRGVLVPRGELMEASFYGKILSQGRVRIVKRYPLHDLKGEVVDPHLRELITTYNQELKSREKGAPIPPLCLDKDKKQEVRSVRCYAKTLSLDKAIPMCFDEKGEPTAFVKSASNHHLALYRTPKGKLVESIVTFWDAVDRARYGIPLVITHPREVMEQVLQRGDIPEQVLSLLPPSDWVFVDSLQQDEMVVIGLSDEELQRALEAQNYRKISEHLYRVQKMSSSYYVFRYHLETSVADDKNTSGRIPKFHRVQSLKAYEERNIRKVRVDLLGRISLL

SEQ ID NO: 605 - protein, 1422 aa, Prevotella denticola
MTQKVLGLDLGTNSIGSSVRNLDLSDDLKGQLEFFSSDIFRSSVNKESNGREYSLAAQRSAHSRSRGLNEARRRKLWATLDLLIKYGFCPMSPESLMRWRTYDKQRGLFREYPIDDKNFNAWILLDFDGDGKPDYSSPYQLRRELVIRQFDFDQPIERYKLGRALYHIAQHRGFKSSKGETLSQQETNSKQSLTDDTADVAGEMKASEEKLSKGLSTYMKENNLLTVGAAFAQLEDEGVRVRNNNDYRAIRSQFQREIETIFKFQQGLSVENELYERLVSEKKNIGTIFYKRPLRSQRGNVGKCTLERTKPRCAIGHPLFEKFRAWTLINNIKVRMSEEEQAEQLPMKLRFELYNDCFLAFVRAEFKFEDIRKYLEKRLGVHFSYNDKTINYKDSTSVAGCPITARFRKLLGEDWESFHVDGQKQRQAHGKNNASFHTVSYSTNDIWHFCYDAEEPEAVLSFAQDNLKWEKKKAEELVRIWSAIPQGYAMLSQKAIRNINKMLILGLKYSDAVLLAKVPEIVEITDGEILSVTEDYHRVEAQVGYEKQINNIVNALIAKYKSASEEYRFADHNYEYQLDKSDEKDIIKQIESNIGTRKWSLLDADEQTDILQKVRDKYQNFFRSHERKFVESPKLGECFEEYLMKKFPMVEGERWKKLYHPSQIAIYRPVPANKDRSALRLGNPDIGAIKNPTVLRVLNTLRKRVNQLLDDGIISPDETRVVVETARELNDANRKWALDTYNRIRHDENEKIKKILAEFYPKRDNISTVDIDKARYVIDQREMDYFTEAKTYHKDIKKYKLWLEQGGQCMYTGRTINLSNLFDPNSFDVEHTIPESISFDSSDMNLTLCDAHYNRFIKKNHIPADLPNYDKSVVIDGKEYSPIKPRLQRWADRVERLNRNVEYWRGQARRAQNKDRKDQCMREMHLWKMELEYWTKKLERFTITEVTDEFKNSQLVDTRVITRHAVLYLKSIFPHVDVQRGDVTAKFRKILGIQSVDEKKDRSLHSHHAIDATTLTIIPGAAKRERMLELFAKIEEVNKMLSFSGNEDRTGLKQELDGLKNQLNKEVKACRIGHNVSEIGTFINDNIIINHHVKNQALTPVRRRLRKRGHIVGGMDNPRWQTGDALRGEIHKASYYGAITQYAKDKEGKVLMKEGRPQINPTIKFVIRRELKYKKSSTDSGFASWDDLGKAIVDKELFALMKGQFPEGTSFKDACEQGIYMIKKGKNGEVDTKLYRIRHIRCKTKQKNALKIKEQAYKSEKEYKRYFYAAVGDLYAMCCYTNGKTREFKIYSLYDISCHRKVGVEDIPEFITDKKGNRLMLDYKLHTGDMILLYKENPEELYDLDNVSLSKLLYKINGFENDGLRIRMVNHLVAKEAMGESVKDYAKLPDIIRCGVKTIKFLVMGENRDFVIKNGKISFNHR

SEQ ID NO: 606 - protein, 443 aa, Prevotella disiens
MELDYWKGKYNRFTMTEIPEGFSRRQGMGIGLISRYAGLYLKTIFHKKDNPQKSNVYIVKGSITAEFRRIWNIQDDYEKKCRDNHIHHCIDAIVVGCIGKREYDLMAQFYRDEEKYRWEKKKKPFFKKPWETFTQDMLSLKDEVLTVHFNPSNFTKKAHKKVFTPKGIFVAQGDCARVKLHKESYFGAIEQKGEIKYVMRKELSALKIEDIKNIVDAVVKEKVLAVVKKKGFKQAMAEPIYMNEDKRILIKKVRLFVSQTNPLIVKKHRDLSSKEYKQNYYVDNEGNLMIAMYEGVKKNGKIDREITVVNNLEAAKFFRQSQKNNAEKQLISHLSPKNGYPLKTVLTQKQLVLMYEDSPKEIKLRDTKNMVKRLYQVVEIEKDGRVKLKFHQEARSEGLNKNSAAFKIQDTPESLYRHTKSNLKVLVNGVDFKINILGEISLI

SEQ ID NO: 607 - protein, 1375 aa, Prevotella histicola
MKKILGLDLGTTSIGWALVYESENTDEKSSIVRLGVRVNPLSVDEKGNFEKGKAITTNADRQQTHGARINLQRYKLRRENLKDCLQKQGWIGTEALCEEGKTSTFETYMLRAKAAEEEISLHELCRVLFMMNKKRGYKSNRKANNKEDGKLFDGMTVAKKLYEEHLTPAEYSFQLLSSGKKFKQEYYRSDLKEEFDRIWNEQQKYYPEILTDDFKQQLQGKSKGNTSKIFLGKYGIYSADLKGLDRKLQPLKWRVEALKQQVDKEVLAFVISDLNGQIASTSGLLGAISDRSKELYFNKQTVGQYLWTSLKETPHVSIKNKPFYRQDYLDEFEKIWETQATYHKELTPELKQEIRDIIIFYQRPLKSKKGLISVCELEQRKVKVTIDGKEKEISIGPKVAPKSSPMFQEFRIWQNLNNILLIDKGNNSIHPLYEEEKNLLYEELSVKEKLSKAEALKVLNKNSKQWDLNYKEIEGNRTQAVLYDCYNRIIVMTGHEEYNFKKLKASEIRSYVKTTFTGLGFNTDILEFDSSLTGHELEKQPMYQLWHLLYSYESDNSRTGNDALLRKLETAFGFPKEYAAVLSDVVFEDSYGNLSVKAMRKILPHLQAGLNYSQACEEAGYKHSRRSLTKNELDQKEYKEKLELLPKNSLHNPVVEKILNQMINVINAVIDEYGKPDEIRIELARELKIGAAERENMTRSINQGNAENKRIREILEKEFALSYISRNDIIKYKLYEELKSNGFKTLYSDTYISKDKLFSKDFDIEHIIPKARLFDDSLSNKTIEARDVNIAKSNKTAFDFISEKYDQQGIEAYKKKLDILLQDGSISKAKYNRLLMKEADIPSGFIDRDLRDTQYIAKKAYEILSDLVRNVTPTTGAVTSRLREDWQLVDVMKELNFEKYQKLGLVEVIEDRDGRKIKRIKDWTKRNDHRHHAMDALTIAFTKPSYIQYLNNLNARSDKNSSIYGIENKELHREDNKLRFNAPLPINEFRAEARRHLKSILVSVKAKNKVMTQNVNVIKTKHGVIKKVQLTPRGELHNATFYGTKKRPIIKMVKVGAALDEVTIKKVSSSFIREALLDRLHEYNGDAKKAFTGRNSIDKNPIYIDEEHKKTVPALVKTIEWEMYHPTRKLISPDLKIDKVIDKGIREILKTRLAKFNGDAQKAFSNLDENPIYKDEAKKITLKRVSLEGVSSVIPLHTLKDREGKLVVGKDGKPVLGDYVQTSNNHHIAFYMDENGNLQDNVVSFFEAAERKSQGVPVIDKNYNHDKGWNFLFTMKQNEYFVFPNEVTGFNPSEVDLMDEANYSIISPNLYRVQKMSKASGRDYWFRHHLEAMLNDDPKLRNSMFKRITSLKALEGIVKVRINCIGKIVAVGEYD

SEQ ID NO: 608 - protein, 1380 aa, Prevotella intermedia
MKRILGLDLGTTSIGWALVNEAENNNEASSIVRLGVRVNPLTVDEKSNFEKGKAITTNADRQLRHGARINLQRYKLRRQNLHDCLQKQGWLGTEAMYEEGKASTFETYKLRAKAAEEEISLHEFARVLFMLNKKRGYKSNRKANNKEDGQLFDGMTIAKKLYEEHLTPAEYSLQLLNKGKKFTQGYYRSDLNAELERIWDEQKKYYPEILTDEFKQQLEGKTKTNTSKIFLAKYGIYSADLKGLDRKFQPLKWRVEALQQQVDKEVLAFVISDLKGQIANTSGLLGAISDRSKELYFNKQTVGQYLWASLEENPHISIKNKPFYRQDYLDEFEKIWETQAAFHKQLTPELKQEIRDIIIFYQRPLKSKKSLISVCELEQRKVKATIDGKEKEITIGPKVAPKSSPVFQEFRIWQNLNNVLLIDNDTNEKRPLDEVERNLLYKELSIKAKLSKTEALKILNKKGKQWDLNYRELEGNRTQAILFDCYNRIITLTGHEECDFKKIKASEIRHYVSTIFKNLGFSTEILDFDPSLKKHELEKQPMYQLWHLLYSYESDNSRTGNESLLRKLETTFGFPEEYATVLCDVVFEEDYGNLSVKAMREILPYLQAGNDYSQACAYAGYNHSRHSLTKEELDQKVYKERLELLPKNSLRNPVVEKILNQMINVINAIIDEYGKPDEIRIEMARELKSSAADRKKTTHAISQGNAENQRIREILEKEFSLSYISRNDIIKYKLYEELEPNYYKTLYSDTYITKDKLFSKDFDIEHIIPKARLFDDSFSNKTLEARNINLEKSNKTAFDFIKEKYGEDGAEAYKKKLDMLLENDAISRPKYNNLLRAEADIPSDFINRDLRNTQYIAKKACEILGELVKTVTPTTGKITNRLREDWQLVDVMKELNFEKYEKLGLTEIVEDRDGRKIKRIKDWTKRNDHRHHAMDALAIAFTKPSFIQYLNNLNARSNKGDSIYAIENKELHYEEGKLRFNAPIPVNEFRAEAKRHLSAILVSIKAKNKVMTQNVNKIKTKHGIIKKIQLTPRGPLHNETIYGTKMRPIIKMVKVGAALDEATINKVSSPAIREALLKRLNEYSGNAKKAFTGKNTLEKNPIYLNAGRTKTVPSLVKTVEWESFHPTRKLIDKDLNVDKVVDKGIREILKARLEEFNGDAKKAFSNLEENPIYLDEAKKIALKRVSIEGVLSAIPLHTLKNQAGKPITGKDGKPVLGNYVQTSNNHHIAFYYDEDGNLQDNAVSFFEAAERKSQGIPVIDKDYNRDKGWRFLFTMKQNEYFVFPNEATGFIPSEVDLTDEANYGIISPNLYRVQKVSRIDKGTSASRDYWFRHHLETILNDDAKLKNLAFKRIRGLLELKDIIKVRINSTGKIVAVGEYD

SEQ ID NO: 609 - protein, 129 aa, Prevotella multiformis
MQKGGTGCKINRQTVGNVEVNVLNLRLYDRTDDREVTAGYLPTKEDYVRLFVYLNDRKEINQDTLLKDYFRLKKVKCGNEKEFAIRWNYIEDKEKKYPCNETRHELLAALDRAGMEHGWLDDSGTSARW

SEQ ID NO: 610 - protein, 535 aa, Prevotella multiformis
MVKGLLSNIVRTAEEREETSKFVISCTGRITDRLKQDWGLNDVWNSLVYTRFKRLNELTETEAFGHWQDKDRRVFQTSVPLELQRGFSKKRIDHRHHAMDALVIACASRNIIGYLNNESAESPEKREDLRRKLCDKNHIIRKPWESFTQDARAALEDIVVSFKNYVRIINKATNYYERYDADGRKTKAEQKGGEMWAVRKPMHEATYYGKVNLRRKERVSLKAALEDIPSICNRDLRDYINGLVEKHFNKEQVLAQFRSVGNRWNKQHIDKVDVWRFSDGKEEMVATRKPLDTSFDAKRIEAVTDTGIQRILSNYLEAKGGDPKIAFTPEGIADMNQHITAYNNGKQHKPILKVRVSTKLGKKYPVGQTGCKAGQFVVAEAGTNLYFAVYEDGEGNRSYDTIPLNEAVECLKQGLPPVPETREKGDRLKFYLSPNDLVYVPAGDEENEIDRERIYKFVDSSGTTANFIPHRTAGLIYNVDKKLAEALCNGSIIQNEYGVGSQQSKNQKALTGEMVKAVCWKLEVDRLGNILRIIK

SEQ ID NO: 611 - protein, 1380 aa, Prevotella nigrescens
MKRILGLDLGTTSIGWALVNEAESNNEASSIVRLGVRVNPLTVDEKSNFEKGKAITTNADRQLRHGARINLQRYKLRRQNLHDCLQKQGWLGTEAMYEEGKASTFETYKLRAKAAEEEISLHEFARVLFMLNKKRGYKSNRKANNKEDGQLFDGMTIAKKLYEEHLTPAEYSLQLLNKGKKFTQGYYRSDLNAELERIWDEQKKYYPEILTDEFKQQLEGKTKTNTSKIFLAKYGIYSADLKGLDRKLQPLKWRVEALKQQVDKEVLAFVISDLKGQIANTSGLLGAISDRSKELYFNKQTVGQYLWASLEENPHISIKNKPFYRQDYLDEFEKIWETQATFHKQLTPELKQEIRDIIIFYQRPLKSKKSLISVCELEQRKVKATIDGKEKEITIGPKVAPKSSPVFQEFRIWQNLNNVLLIDNDTNEKRPLDEDERYLLYKELSIKAKLSKTEALKILNKKGKQWDLNYKELEGNRTQAILFDCYNRIITLTGHEECDFKKIKASEIRHYVSTIFKNLGFSTEILDFDPSLEKHELEKQPMYQLWHLLYSYESDNSRTGNESLLRKLETTFGFPEEYATVLCDVVFEEDYGNLSVKAMRKILPYLQAGNDYSQACAYAGYNHSRHSLTKEELDQKVYKERLELLPKNSLRNPVVEKILNQMINVINAIIDEYGKPDEIRIEMARELKSSAADRKKTTHAINQGNDENQCIREILEKEFALSYISRNDIIKYKLYEELKPNGFKTLYSDTYIPKDKLFSKDFDIEHIIPKARLFDDSYSNKTLEARDINLAKSNKTAFDFVKEKYGEQGAEAYKKKLDMLLGNNVISKPKYNKLLMTEADIPSDFINRDLRNTQYIARKACEILGELVRTVTPTTGKITNRLREDWQLVDVMKELNFEKYEKLGLTEIVEDRDGRKIKRIKDWTKRNDHRHHAMDALAIAFTKPSYIQYLNNLNARSNKGDSIYAIENKELHYEEGKLRFNAPIPVNVFRAEAKRHLSAILVSIKAKNKVMTQNVNKIKTKHGIIKKIQLTPRGPLHNETIYGTKMRPIIKKVKVGAALDEATINKVSSPAIREVLLKRLNEYSGNAKKAFTGKNTLDKNPIYLNAERTKTVPASVKTVEWENYHPIRKPITPDLKVDKVIDKGIGEILKARLEEFNGDAKKAFSNLEENPIYLDQTKKIALKRVSIEGVLSTIPLHTLKNQAGKPIMGKDGKPVLGNYVQTSNNHHIAFYYDEDGNLQDNAVSFFEAAERKSQGISVIDKDYNRDKGWRFLFTMKQNEYFVFPNEATGFIPSEVDLTDEANYGIISPNLYRVQKMSRIEKGTSVSRDYWFRHHLETILNDDSRLKNSAFKRINSLKPLEGIIKVRINSIGKIVAVGEYD

SEQ ID NO: 612 - protein, 1506 aa, Prevotella nigrescens
MKTILGLDLGPNSIGWAKVEVDDEGNYLRNIKLGSRIIPMTQDMLGDFDKGVKVSQTAIRTDFRGNRRLIERHLLRRERLHRVLHALKFLPKHYEDAIGWDRNEPATYGKFVNNSEPKLAWERQEDGSMRFLFMESFNEMVADFAQNQPSLVSDGKKIPLDWTIYYLRKKALTRPIKKEELAWILLNFNQKRGYYQLRGEEEEDNLTKRKEYYKLKVVGVEADGAPKGGKTWYNIHLENGWTARCQSKIPLDDWVGKVKEYIVTTEYEDDGKTPKCDKEGKVKRSFKSPEKDDWQLIKTRTEKFIDDSNKTVGAFIYDYLLEKPFDKIRGKYIRTIERKYYKNELREILREQTKYHEGLHSLEALKICAEELYKNNQQHQEYLLKKDMTFLLLNDLIFYQRPLKSKKSLIADCPYEVYKYDDKLTGKKGQKKIKCIAKSNPYYQEFRLWQFIANLRLFSVTDGKEVTAEYLKTEEDYVRLFSFLNDRKDIKQETFLRSFLKLKKESIGSEKIYPIRWNYIEDANKSYPCNATRHELLLAFDRADIPRELLDVEEREYRLWHLLYSIEAKEETESALRKLKANKAFGDLNIDDAFVNSFLKIKPFEKEYGAYSEKAIKKLLAVMRRGSLWKEADICEATKQNIAKILQNDIDEKLKKKIEAAVSSFNKLSDFQGLPTWLACYVVYGRHSEAAQIQCWQSPEDLKTYINKFKQHSLRNPIVEQCLLETLRTVYDIWKDAGQIDEIHIELGRNMKSTAEQRARKTKDILRNENTNLRIKNLLVELKNDDKIENVRPYSPSQQEILRIYEEGALQELSKEDEMFEDISKISKMAQPSPTELSRYKLWLEQKYRSPYTGRVIPLSKLFTTAYQIEHIIPQSRYFDDSFNNKVICESEVNSLKDNMLGYEFIKECGGRIVHCTLLGDVKIFTKEEYKDFVTKHYIDNTYKRDKLLLEDIPQEFSARQLNDSRYISKMVQTVLSNIVRAENEQEATSKFVVSCNGAITNRLKKDWGLNDVWSSIVCPRFKRLNEITKTNAFGHWEDKAGKHVFQTTVPLELQRGFSKKRIDHRHHAMDALVIACASRNIVNYLNNESANSPEKREDLRKKLCDEKRKIRKPWKTFTQDAREALSDVVVSFKNYVRVINKATNYYEHYSSSGNKVMISQKGNDMWAIRKPLHKESVFGRVNLCRKVIVSLKKALENIPAICDKTLRDYINALVEKHFNTRQLLAHFKSINYRLNRQCVEKVEVWQFSDEKIEMVARRKSLDTSFDDKQISSITDTGIQKILLNYLQTKDGNAEIAFTPEGIEEMNKNISLYNDGKAHQPILKVRVATPKGMKYPVGQTGNKATKFVVAEKGTNLYFAIYENELGVRSYDTIPLNIVVERLKEGLSPVPQANEADIPLKFYLSPNDLVYVPTKENEDELCRDRIYKFVDSSGTTANFVPHTSANTIYNVDKEYAEKCCNGAVFLNEYGLGSPQSKNQRALTGEMIKEICWKLKVDRLGNIIKVIK

SEQ ID NO: 613 - protein, 774 aa, Prevotella oulorum
MEQCILETLRTVYDIWKEAGQIDEIHVELGREMKQTAEQRAHLTEKVLRNENTNLRIKSLLMELKNDADMKDVRPYSPMQQEILRIYEEGALQTLSKDDAAFTEIMKISKMAQPSASELQRYRLWLEQKYRSPYTGKPISLSKLFTSAYQIEHIIPKKRYFDDSFSNKVICEAEVNGKKDSMLAYEFIKDCGGDVIHCTTLGDVTILSEAEYKALVTELYANNKSKKDKLLMEDIPQDFINRQLNDSRYISRVVMTLLSNIVRIEGEEEATSKFVIPCSGGITDKLKKDWGLNDVWNNIVYPRFERLNALTNTSDFGQWENKEGKRVFQTSVPLELQRGYQKKRIDHRHHAMDALVIACASRKIINYLNNQEANDPTKQENARKQLCIKSRIIRKPWETFTQDAYKALDNIVVSFKNYVRVINKATNYYERYNADGKKAVDEQKGEAMWAIRKPMHKDTVFGHVNLRRKAVVKLKDALENIPAICDKTLRHYIQDLQKKHFNTKQLLAHFKSINYRLNKQAVDKVEVWQYSDDKEQLAATRKPLGPSFDAKCIAAITDTGIQKILLNYLQAKGGDPAIAFTPEGIAEMNQNIAVYNGGKQHQPILKVRIAKPMGKKFPIGQTGNKAFQYVIAEEGTNLYFAIYEDEEGNRTYDTIALREVVERLKQGLTPVPEKNEKGVALKFHLSPNDLVYVPTADELLSKVCSLDKNRIYKMVSATKSECLFIPHSVAKTIYDKVEFEALNKMGRALTGEMIKSVCWKIEVDRLGHIVNIIK

SEQ ID NO: 614 - protein, 691 aa, Prevotella oulorum
MKTILGLDLGTNSIGWAKVIVDDNENYLRDIQLGSRIIPMSQDVLGKFDKGVTESQTAIRTSFRGVRRLRERTLQRRERLHRVLHTLHYLPPHYDSAIGWDRKTPTTYGKFLNHGEPKLAWERREDGTMQFLFMDAFHEMIADFAKYQPALVADGKKVPLDWTIYYLRKKALTQPIKKEELAWILLNFNQKRGYYQLRGEEDEENAAKHEEYHELKVVGVEVDEAGKGDNTWYNVKLENGWTYHRQSKIPLDDWVGKVRAFIVTTEYEKDGTTPKKDKEGNVKRSFRSPDEKDWGLRKKQTEHSLEASGTPVGAFIYDHLLKEPSDKIRGKFIHTIERKYYKQELAAILREQSKHHEKLCSKDMLKACIEELYPNNPLHRESLLKKDMPYLLIEDLIFYQRPLKSKKSLIAECPYEAYSYVDKETGEMKRQGIKCIAKSNPYYQEFRLWQLIANLRLRNRSDERDVTAEYLPHQEDYVRLFTYLNDRKEINQETLLKDFFKLKKVTIGGEKVFPIRWDYIEDKEKKYPCNATRHELLLALDRAGIEHDWLNDRDLAYRLWHLLYSVDSKDETERALRKLKDDDAFVESFLKIKPFEKEYGAYSEKAIKKLLPVMRRGSLWNEADLCPSTKERIANILQGTIDEKLKKKIGAFISSCQQVSDFQGLPEWLACYVVYGRHSEATDIQRWETPE

SEQ ID NO: 615 - protein, 242 aa, Prevotella saccharolytica
MKLVLGLDLGVGSVGWALIFITDSGEPIKILALGERIVSMDSNNSNEFSAGATCTLNQKKTKAKSVRKGYSRYVQRRDALTAELRHIGMMPDETLIKLPVLDLWQLRANAATEGKKLSLAEIGRVLYHINQRRGYKHGKSDVSSDNKQKGYVKAVNERYCMIQERQQTIGQYFALKLKETAVTTEKGTFYTFRIKDQVFPREAYEEEFVVAYSTKVLKFKQITTLLNVVICLMMLLLIVQRY

SEQ ID NO: 616 - protein, 1174 aa, Prevotella sp.
MEFHPELCDAELLKACAEELYRNNEAHRAQLLAKDFKHLLVEDVLFYQRPLKSKKSLIANCPYETRQYINKETGEIKDVNVKCIAKSNPYFQEFRLWQWISNLRLLRQADGQDVTAAYIKGNEDKERLFDLLNNQGEIKQEHILRDFLKLKKPKGGEFPLRWNYVDDKIYPANETRHAINKAIKGMAVDKEEKETLGQLLDQPAVAYMLWNLLYSITDRNELARALRRFALTHGVSSVDAFVESFLKVKPFKKEYGAYSEKATKKLLQVMRLGKYWCGDELPEPAKRTKGNKQAVYDEMAHRGICKQTLQNISNIIEENIDERLMGALLNPERPLTELSHFQGLSVSDACYVVYGRHSEVAEIVKWKDADELNTFINNFKQHSMRNPIVEQCVLETLRTVRDVWEQEGQIDEIHVELGRNMKRTAEQRARDTQAIQRNENTNMRISLLLTELKNDPSISDVRPYSPSQRELLKIYEEGALENLTNQDEDIAKISRLAQPSASELRRYKLWLDQKYVSPYTGRPIPLAKLFTPAYEIEHIIPQSRYFDNSFSNKVICEAEVNKLKDNLLGMEFIKKFGGKTKGILDEEAYKLHVTTNYAHNPAKRSKLLMEDLPTDFNSRQLNDTRYISKTVMALLSNVVREEGERETRSKHVVVCTGGVTDTLKKDWGLHDVWHNLVYPRFIRLNNLTGSQNFGYWRYLNEENSKKGEDSKKVFQITLPPECQRGFVKKRIDHRHHAMDALVIACASANIVNYLNNQSAANPHIHENLQRLLCDRKREIRKPWPTFTQDAQAALKDLVVSFKNTVRVVNKASNTYLRYDKDGKKKRFKQEGEGLKAIRKPMHKETYYGEVNLIRKEMVPLKRALDDVNAIVDKELRASIKGLLRDGFNPQQVLANFKAKDFKFDKRDIKKVEVYVSSEKSTPMVATRKSLDTSFNAKRIADITDTGIQKILLNYLKANDNSPEQAFTPEGIAYLNEHIAEYNDGKPHQPILKVRVSEVKGAKFAVGQTGSKKDKFVEAQSGTNLYFAIYEDKEGKRHFETIALKVAAERLKDKQMPVPEINDAGLPLKFYLSPNDLVYVPTDEDRATAHPSIDKMRIYKMVSATDRQCFFLPFTVASVISNKVEFEALNKMERVLDASEYSSAYDSSHVNKVMVKNVCWKLEVDRLGNITKIVR

SEQ ID NO: 617 - protein, 992 aa, Prevotella sp.
MITRILGLDTGTNSLAWAVVDRDANGNYTLVKRGDVIFTEGVKIEKGIESSKAAERTAHKALRVHYSRRRLHKIDTLKVLVELNLCPCLSDEQLSQWKAKKTYPLTDDFMLWQRSGSAEENNPYYCRHRCLTQKLDLTDQSQRFLLGRAFYHLAQRRGFLSNRLDTSADSDESGKVKSGIAQLSVEMEKAGCEFLGEYFYQLYKQHGNTIKLRSRYTDREEHYKKEFLAICEKQELDPKWVEALQRAIYFQRPLKSQRKGVGKCTFEPKKPRCAESHPDYEAFRMLCFLNNVKIQTPNDTSLRPLNEDEREKIWPIFFRKSKPNFDFEDIAKALAGKNNYAWYKDAGEKPFKFNYRMQQGVSGCPVTAQLIDIFGSDWQTAIAETYTAVEKKNGTKTIDEMADDVWNVLYSFSSKDKLKAFATEKLQLDEASATKFANAKLPHGFASLSLKAIRNILPFLRQGFIYAHAVHLAKIPDIVTKAVWNDADKREMILSGLMEIIENYNPKDRGVEGTIDFCIKSHLQDVIDLRPGAADALYHPSMIETYPDAKLNKMGVFQLGSPRTNAIRNPMAMRSLHILRSVVNQLLRDGIIDRDTEVHVEYARELNDANKRKAIADYQREQEKKRKQYRDDIIALYKSECHKEIEPTDTDILKFQLWEEQNHLCLYTGTQIGICDFLGDNPKFDIEHTVPRSVGGDSTQMNLTLCDATFNRQVKGAQLPSQLSNHADILVRIDHWKSKCEDLRKQLDKIRTYGGMEKNMKDRLIQKRHRLKMDLDYWQGKYSRFTMTEVPEGFSRRQGAGIGLVSKYAGLFLKSLFHNEQNPNKSNVYVVKGVTTAEFRRMWGLQGEYEKKSRLNHCHHCIDAITIACIGKAEYDKMAQYYHDEELFQWRGTTTKPHFNKPWPTFTEDVLAIEQSLLVKHLTKDNMPKQAKKRVRTATGKYLAQGDTARGSLHKDTYYGAIEQNGEIRYVLRKPLNKFENEAELEKIVDQA

SEQ ID NO: 618 - protein, 1375 aa, Prevotella sp.
MKKILGLDLGTTSIGWALVNESENKDEQSSIVRLGVRVIPLTVDEKGNFEKGKAITTNADRQQVHAARINLQRYKLRRENLRDCLQKQGWIGSEPMCEDGKSSTFETYKLRAKAAVEEVSLHEFARVLFMLNKKRGYKSNRKANDKEEGKLFDGMTIAKKLYEEHLTPAEYSLQLLNTGRKFTPEYYRSDLIEEFEKIWNEQQKYYPEILTDEFKQQLEGKAKSNTSKLFLGKYGIYSADTKGLDRRLQPLKWRVEAMKQQVDKDVLAFVISDLKGQIANTSGLLGAISDRSKELYFSKQTIGQYLWASLQENPHISIKNQPFYRQDYLDEFEKIWETQATYHKELTSELKQEIRDIIIFYQRPLKSKKNLIAVCELEQRKVKVTVDGKEKEITIGPKIAPKSSPMFQEFRIWQNLNNILLLDHETNSKRPLYEEERNLLYEELSVKEKLSKTEALKVLGKKSKQWDLNYKELEGNRTQAVLYDCYNRIIVMSGHEECNFKKLKASDIRHYVKMIFKNLAFNTDILCFDSSLKGHELERQPMCQLWHLLYSYEGDNSRTGNDALLRKLETSFGFPKEYAAVLADVIFEDSYGNLSVKAMRNILPHLQAGKDYSQACEEAGYKHSRRSLTKEELNQKVYKEKLELLPKNSLHNPVVEKILNQMVNVINAVIEEYGKPDEIRIELARDLKIGAAERENMTRSINQGNAENKRIREILEKEFALSYLSRNDIIKYKLYEELKSNGFKTLYSDTYISKDKLFSKDFDIEHIIPKARLFDDSLSNKTIEARDVNIAKSNKTAFDFILERYGEQGVKTYKTKLLRLLEDGAISNKKYNNLLKTEADIPSGFIDRDLRNTQYIAKKAYEILSELVKIVTPTTGSVTNRLREDWQLVDVMKELNFEKYQKLGLADVIEDRDGRKVKRIKDWTKRNDHRHHAMDALTIAFTKPSYIQYLNNLNARSDKSSSIYGIEVKELHREEGKFRFNAPLPINEFRAEAKRHLKSVLVSIKAKKKVMTQNVNKIKTKHGIIKKVQLTPRGELHNATYYGTKKRPLVRMVKVGAALDEATIKRVCSPAIRAALLKRLNAYNGDAKEAFTGRNSIDKNPIYLDIEQTKLVPVLVKTIEWGMYHPIRKRITPDLKIDKVIDKGIREKLKARLAEFNGDAQKAFSNLDENPIYMDEAKRITLKRVSIEGVLSAIPLHTLKDKAGKPVIGSDGKPVFGDYVQTSNNHHIAFYIDDKGNLQDNPVSFFEAAERKSQGVPVIDRRYNCDKGWHFVFTMKQNEYFVFPNEATGFIPSEVDLLDEANYCIISPNLYRVQKLSKASGRDYWFRHHLETMLNDDLRLKNSTFKRIQSLKGLEDIVKVRINSIGKIVAVGKYD

SEQ ID NO: 619 - protein, 1483 aa, Prevotella sp.
MKTILGLDLGTNSIGWAKVSVDDYGNYLHDIKLGSRIIPMSQDVLGNFDSGVTVSQTAQRTEFRSKRRLVQRNLQRRERLHRVLHVLDFLPAHYDAAIGWDRTEAVTYGKFLNHAEPKLAWEELGNGKRRFLFMDSFHEMVADFARCQPALVADGKKIPLDWTIYYLRKKALTQAITKEELAWILLNFNQKRGYYQLRGEEEEENPTKQEEYYELKVVSVEATDSRKGNDTWYNVHLENGWIYRRSSKISLDDWVGKVKQFIVTTEYEKDGTTLKTDKEGNVKRSFRAPNENDWGLRKKRTETLLEMSGKTVGAFIYDHLLQEPADKIRGNFIRTIERHYYKAELEAILAEQCKYHIELRDKEMLEACARELYLNNLPHQRSLMKKDMTYLLLYDLIFYQRPLKSKKALIANCPYEYYEYVDKETGEIKRQNIKCIAKSNPYFQEFRLWQFVLNLRLFDRVEDKEVTANYLPTADDHARLFTYLNDRKEINQETLLKDYFKLKKVKIGNEKEYPIRWNYIEDKEKKYPCNETRYELLMALDRAGIEHKWLDDNNLEYRLWHLLYSVEVKSESETALRKLKNDDAFVNSFLKVKPFKKEYGAYSEKAIKRLLAVMRKGFLWNEQDICDETRKRIEIIIKGDVDEKVKERMGHAAYSFDRVSDFQGLPEWLACYVVYGRHSEAMDIQRWDSPERLMAYINNFKQYSLRNPIVEQCILETLRTVHDIWKETGQIDEIHVELGREMKSTSEERARRTQNVLRNENTNLRIKSLLIELKNDTDICNVHPYSPMQQEILRIYEEGALQELNREDEDFEEISKISQMSQPSGKELNRYKLWLEQKYRSPYTGKAISLAKLFTPAYQIEHVIPQSRYFDDSFTNKVICEAEVNTLKSNLLGYEFIKKHGGEIIHCTTLGDVRIFSESEYKAFVMDHYANNKSKKDKLLMEDIPQEFLSRQMNDSRYISKVVKTLLSNIVRMADESEATSKSVIVCTGGVTDRLKKDWGLNDVWNSIVYSRFERLNRLTGTEAFGHWENKDGKRVFQTSMPLELQRGFRKKRIDHRHHAMDALVIACASRNIVNYLNNESANNPKKREDLRRQLCDKNRVIRKPWETFTQDAYNALENVVVSFKNYVRVINKATNRYEHYDENGKKRFVQQKGSELWAIRKPMHKETYYGHVNLRRKELVTLQKALDDIPSICDKKLRDYISALVEKHFNKRQLLAHFKSTDYYWQKQYVNKVYVWTFSDDIKPLVATRKLLDTSFDAKRIGTITDTGIQKILRNYLEAKGGNATLAFTPEGIVEMNQNISKYNDGKPHQPILKVRITEPMGAKYRVGQTENKMAKYVEAQSGTNLYFAIYEDSEGKRSYTTVPLDEVAERLKQRLSPVPEKDENDVPLKFYLSPNDLVYVPTEEELQLRECKLNKDRIYKMVSSTGSECHFIPYYVANVIYNKVEFEAKNKIGRALTGEMIKAVCWKLEIDRLGNILKVIK

SEQ ID NO: 620 - protein, 593 aa, Prevotella sp.
MNTRILGLDTGTNSLAWAVVDRDAKGNYTLVRRGDVIFTEGVNVDGQPVPSKAAVKSKYKSLRVQYARRRLRKIDTLKVLVSLDLCPYLSDQQLSQWKAKKTYPLTDDFMLWQRSGSAEENNPYYCRYRCLTQKLDLTDQSQRFLLGRAFYHLAQRRGFLSNRLDTTSDSAESGKVKSGIAQLSVEMEKAGCTFLGEYFYQLYKQHGNTVRLRSRYTDREEHYIKEFLAICEKQELDAQWVEKLQRALYFQRPLKSQRKGVGKCTFEPKKPRCAESHPDYEAFRMLCILNNIKIKTPKDVSLRPLNAEEREKVWPLFFRKSKPNFDFEDIAKALAGKNNYAWYKDAGEKPFRFNYRMHQGVSGCPVTAQLIDIFGSDWKAGIAETYTAVGKKNGTKTIDEMADDVWNVLYSFSSKDKLKAFATDKLQLDEARATKFANAKLPHGFAALSLKAIRNILPFLRQGFIYAHAVLLAKIPDIVTAAVWDDADKREQILSGLLEVIENYNPDDRGIEGTIDFCIKSHLQDVVDLRPGAADALYHPSMIEAYPDAKLNKMGVFQLGSPRTNAIRNPMAMRSLHILRSVVNLLLRDGMLS

SEQ ID NO: 621 - protein, 1424 aa, Prevotella sp.
MTQKVLGLDLGTNSIGSAVRNLDLSDDLQWQLEFFSSDIFRSSVNKESNGREYSLAAQRSAHRRSRGLNEVRRRRLWATLNLLIKHGFCPMSSESLMRWCTYDKRKGLFREYPIDDKDFNAWILLDFNGDGRPDYSSPYQLRRELVTRQFDFEQPIERYKLGRALYHIAQHRGFKSSKGETLSQQETNSKPSSTDEIPDVAGAMKASEEKLSKGLSTYMKEHNLLTVGAAFAQLEDEGVRVRNNNDYRAIRSQFQHEIETIFKFQQGLSVESELYERLISEKKNVGTIFYKRPLRSQRGNVGKCTLERSKPRCAIGHPLFEKFRAWTLINNIKVRMSVDTLDEQLPMKLRLDLYNECFLAFVRTEFKFEDIRKYLEKRLGIHFSYNDKTINYKDSTSVAGCPITARFRKMLGEEWESFRVEGQKERQAHSKNNISFHRVSYSIEDIWHFCYDAEEPEAVLAFAQETLRLERKKAEELVRIWSAMPQGYAMLSQKAIRNINKILMLGLKYSDAVILAKVPELVDVSDEELLSIAKDYYLVEAQVNYDKRINSIVNGLIAKYKSVSEEYRFADHNYEYLLDESDEKDIIRQIENSLGARRWSLMDANEQTDILQKVRDRYQDFFRSHERKFVESPKLGESFENYLTKKFPMVEREQWKKLYHPSQITIYRPVSVGKDRSVLRLGNPDIGAIKNPTVLRVLNTLRRRVNQLLDDGVISPDETRVVVETARELNDANRKWALDTYNRIRHDENEKIKKILEEFYPKRDGISTDDIDKARYVIDQREVDYFTGSKTYNKDIKKYKFWLEQGGQCMYTGRTINLSNLFDPNAFDIEHTIPESLSFDSSDMNLTLCDAHYNRFIKKNHIPTDMPNYDKAITIDGKEYPAITSQLQRWVERVERLNRNVEYWKGQARRAQNKDRKDQCMREMHLWKMELEYWKKKLERFTVTEVTDGFKNSQLVDTRVITRHAVLYLKSIFPHVDVQRGDVTAKFRKILGIQSVDEKKDRSLHSHHAIDATTLTIIPVSAKRDRMLELFAKIEEINKMLSFSGSEDRTGLIQELEGLKNKLQMEVKVCRIGHNVSEIGTFINDNIIVNHHIKNQALTPVRRRLRKKGYIVGGVDNPRWQTGDALRGEIHKASYYGAITQFAKDDEGKVLMKEGRPQVNPTIKFVIRRELKYKKSAADSGFASWDDLGKAIVDKELFALMKGQFPAETSFKDACEQGIYMIKKGKNGMPDIKLHHIRHVRCEAPQSGLKIKEQTYKSEKEYKRYFYAAVGDLYAMCCYTNGKIREFRIYSLYDVSCHRKSDIEDIPEFITDKKGNRLMLDYKLRTGDMILLYKDNPAELYDLDNVNLSRRLYKINRFESQSNLVLMTHHLSTSKERGRSLGKTVDYQNLPESIRSSVKSLNFLIMGENRDFVIKNGKIIFNHR

SEQ ID NO: 622 - protein, 241 aa, Prevotella sp.
QAVKEKIKEAIAGKNFKTAIAEPIFMNKEKGIRINKVRYYVKAQERLKIRQQRDLSSKEYKQFFCVENESNYLLAIYEGELKGKKERDFCVVNNLDSAACLKRSNKGKAAPLVPERSEERNLPLLAVLKRGTQVLFYENSPEEILFDNPQDLVRRLYKVTGINTKKDVKNGKTYLYGNIELRFHQNAQKKDDVKMQSGVYKNNEVLRQGIVLSHKQFKALVEGVDFEFNVLGEIKKKERHA

SEQ ID NO: 623 - protein, 1216 aa, Prevotella stercorea
MTKILGIDTGTNSLGWAIVDKTADNYNLLDKGVNIFQEGVKIEKGIESSKAAERTEHRATRVRYYRIKLRKIRLLRILSDNHLCPPLSQEELSTWRLKKVYPKNELFMQWQRTDDDTEKTPYAYRHKCIHEKLDLSDVTDRYILGRAFYHIIQRRGFLSNRKEQGGEDSGKVKEGISTLTHEMNEAGYEYLGDYFYALYNKGEKIRKHYTARNEHFLSEFKAICEKQDLEKELGSEVVRNIEKAIFDQRPLKSQKGQVGKCVFEKNKTKCPSSHPMYEEFRMLTFINNIKIKTPNDDVLRPLNTGEREKIMPLFFRKSKKQFDFEDITKKLAPKKMYGFYKKEEDAEMPFLFNYPMDTSVSGCPVTAALKDVFGDDWITAICETYTLGEGKSRFDIVNDIWHALYFYSDKDKLAEFAINRLQLSEDEAKIFSEISLPADYASLSLKAICKILPYLRRGLIYSHAVFLGNLCEVMPKYEWSIKEMRETIIDNIIMEMDKCDTKDKRTFEVCIKDYLKGQYNVSDNSLKKLYHPSMIETYPRVQYTNEHGVYQLGSPRIDSVRNPMAMRSMFRLRKLVNRLLVEGKIDQNTEVHIEFARELNDANKRNAIALFVKENQSANDEARKQIITLFKKETGTDIEPTDKDILKYVLWEEQNHICLYTGKQIRISDFIGANPKFDIEHTIPRSVGGDSTKMNLTLCDSRFNREVKKTKLPVELPNHDEIMERIKEWKKNYELLDIQIRKNKKLSKGATTKEQKDTIIRKRHLLELRRDYWRGKYERFTMESVPEGFSRRQGTDISVISKYARLYLKSLFNRVYTVKGIATSDFRKIWGIQDIYSKKERINHVHHCIDAIVIACIGLDEYNKLGAYYHDEENNKWYGMSKASFKKPWATFVEDIKKIQDEILVYHYTPDNMPKQGRRRIKIDGKKILCKGDAARGSLHNDTYYGAIENDGAVKYVKRIDLASLEEKDVKNIVDDTVRSIIEAAIKEKGFKDAMASTIWMNEEKRVPIKKVRCFTPSITKPLNIRKQRDVSIKEYKQQYHVANDSNYLLALYIGTDNKGKEKREFEIVNILQAAQYYRTSNDKEVVDRHIVPIKSEHDYPFAYTLKIGTMVLLYEKSPNEVWDATIKERNRRLYKVTGLSTMRMKGRNGEYAYATVKLIHNEEARPSKDIKAKNGEYEQGEEFRPAIIMLHTQLNALVQGYDFEINELGEIRRLR

SEQ ID NO: 624 - protein, 1487 aa, Prevotella timonensis; identical to SEQ ID NO: 135

SEQ ID NO: 625 - protein, 770 aa, Pseudoramibacter alactolyticus
MAKGYFASDEEIDFSGVDDGFKNTLSSHQKFKEIFDVEVLNDWQKSMSEKIIFWATVYGDSKKFLKERLEDAYGNELDQKQIKRILGLRFKDWGRLSEAFLNLEGKNSKTNQSQTIIEALWNGDGTNNFNLMELLSSQFTYRDTLKKRALKGEKTLTNITYEDLSDLYLSPSVRRMVWQTILIVKELRQVLGAGPAKIFIEMARDVTLKAGTRTTSRRQQLLDLYKNVQTESRNWVEEIETQEESRFRSKKIFLYYTQMGQCMYTGEPIVFKDLFNRNLYDIDHIYPRHFVKDDSLINNLVLVKKQANSHKSDTFPIENSIQQARRDFWKWLSEKGLISREKFNRLTRRTSFSDEELAGFISRQIVETRQGTKAVAQIFENALPDSEVVYVKAGNVSDFRHHFNLLKCREINDLHHAQDAYLNVVVGNVYHTKFTKNPINFIKGYRKDRKAYAYHMDQIFDHPVKRNDIIAWQTDKNQSIATVKKVMAKGTPLVTRMSYEEHGELSNQNICSAKAAQKAEGKGYLPIKNSERLSNTQRYGGYNKYAGSYFFLVEHTLKKNRVRTIETMPLFLRDTIKTSKDLLKYCCESLKLEAPSIRVMKIKMGSLLSVNGAFVYLTGRSGKKLITPNGFQLILPQKWQDYIRLLIKTKDSPDDVEGISGGKNIEFYDILVEKHTKTCLKNRPNPIGEKLREWRNDFIALDNQKQSDILLEILKLTTFDNSGADLRAIGGKNQSGVSTIGKKISSQKSVVLVHRSVTGIFEKQVDLLSI

SEQ ID NO: 626 - protein, 103 aa, Rhizobium etli
MSGEQLTREIGRSGVKASAVGLGTWAIGGWMWGGTDEAQSIAAIQASLDAGVTLIDTAPAYGLGRSEEIVGKALAGRRDKAVIATKCGLVWHTQKGNHFFDQD

SEQ ID NO: 627 - protein, 1059 aa, Rhodovulum sp.
MGIRFAFDLGTNSIGWAVWRTGPGVFGEDTAASLDGSGVLIFKDGRNPKDGQSLATMRRVPRQSRKRRDRFVLRRRDLLAALRKAGLFPVDVEEGRRLAATDPYHLRAKALDESLTPHEMGRVIFHLNQRRGFRSNRKADRQDREKGKIAEGSKRLAETLAATNCRTLGEFLWSRHRGTPRTRSPTRIRMEGEGAKALYAFYPTREMVRAEFERLWTAQSRFAPDLLTPERHEEIAGILFRQRDLAPPKIGCCTFEPSERRLPRALPSVEARGIYERLAHLRITTGPVSDRGLTRPERDVLASALLAGKSLTFKAVRKTLKILPHALVNFEEAGEKGLDGALTAKLLSKPDHYGAAWHGLSFAEKDTFVGKLLDEADEERLIRRLVTENRLSEDAARRCASIPLADGYGRLGRTANTEILAALVEETDETGTVVTYAEAVRRAGERTGRNWHHSDERDGVILDRLPYYGEILQRHVVPGSGEPEEKNEAARWGRLANPTVHIGLNQLRKVVNRLIAAHGRPDQIVVELARELKLNREQKERLDRENRKNREENERRTAILAEHGQRDTAENKIRLRLFEEQARANAGIALCPYTGRAIGIAELFTSEVEIDHILPVSLTLDDSLANRVLCRREANREKRRQTPFQAFGATPAWNDIVARAAKLPPNKRWRFDPAALERFEREGGFLGRQLNETKYLSRLAKIYLGKICDPDRVYVTPGTLTGLLRARWGLNSILSDSNFKNRSDHRHHAVDAVVIGVLTRGMIQRIAHDAARAEDQDLDRVFRDVPVPFEDFRDHVRERVSTITVAVKPEHGKGGALHEDTSYGLVPDTDPNAALGNLVVRKPIRSLTAGEVDRVRDRALRARLGALAAPFRDESGRVRDAKGLAQALEAFGAENGIRRVRILKPDASVVTIADRRTGVPYRAVAPGENHHVDIVQMRDGSWRGFAASVFEVNRPGWRPEWEVKKLGGKLVMRLHKGDMVELSDKDGQRRVKVVQQIEISANRVRLSPHNDGGKLQDRHADADDPFRWDLATIPLLKDRGCVAVRVDPIGVVTLRRSNV

SEQ ID NO: 628 - protein, 1405 aa, Riemerella anatipestifer
MKTILGLDLGTNSIGWALVKEAENSNEKSEIIKLGVRVNPLTVDEKTNFEAGRPLSTNADRTAKRSARRNLQRYKLRRKNLIDLLIKNQLIDKDTPLTEIGKNTTHQTLELRAKAARERIELEDLARVFLAINKKRGYRSSRKVNNEEEGQAVDGMAVAKKLYDENLTPGQYAYELLSKGKKYVPDFYRSDLQAEFNAIWEYQKQFYADILDDELYNALKGQGQQNSRKRFLAIKGVYTAENKGKRDDVKLRHYKWRSEAISKKINIEEVAYVLVEINNDLNKSSGYLGAISDRSKELYFNKETVGENLWKQIQKNPHTSLKNQVFYRQDYLDEFEQIWETQAQFHPQLTLALKEQIRDVIIFYQRKLKSQKGLLSFCQFESWEIERKDENGNVILNKTTQLPKRQTVGRRVAPKSSPLFQEFKIWQNINNLEVTKISEGASKNKKETETLSDDERKLLFEELNLRGNLSQKEVLQILGLKDKEYKTNFSEGLEGNRTNAALFNIYQQIAENEGYGFDWSKKSAQEIKEELKAVFPQIGIQADILDFNANLDGKEFENQASYQLWHLLYSAEEDDKINEEDQIIYGNSAVSLKKKLCEKFGFTPEYAKWIANVSLQDDYGNLSTKAMRKIIPYLIDGNDYSEACALAGYNHSNSLTKEENDNRELLDKLELLPKNSLRNPVVEKILNQMVNVVNQVIETYGKPDEVRIELARELKKSAEKRAEMTKSINEATRRNEDIKKLITKDFGIPNPTKSDVVRYRLWEELAPLAYKDVFTGKQIKKEDLFSSKIDIEHIIPKALLFDDSFSNKTLVFRETNLKKADRTAYDFIESDYNATLDDYIQRVETLYNNTKGTISKGKRNKLLMAQKNLPDGFIERDLRNSQYIAKKAKAMLYQVFKDVNVTSGSITDRLREDWDLINVMKELNFPKYKALGLTEIEERYDIGQEKTKRVEVITDWTKRNDHRHHAMNALTVAFTTSSHIQYLNYLNARKNESHKEHKNIKGIENKITHKQKDKRKFIPPMPNFREEAKKHIETILVSIKNKNKVYTKNINKTKKKSGHNTKEQLTPRGQLHKETVYGKSKRPMSKPTKINKNFSLEQAQLIINVQEKELVLRHLAQFDNNPAVAFDTKTLKKMPLLKNGEPLKEVLCFEEIFTIRKDITPDLKIEKVVDEKIKAILEQRKKDFGGNAKEAFSDLDKNPIWLNKKKGICIKRVTITGVSNAEALHHQKDHLGREILDDNGNPIPADFVSTGNNHHLAVYLDSEGKLQDNIVSFYEAVVRTSQGLPVVDKGLNKDLGWKFLFSLKQNEMFVFPNDDFDINDFDLLDDKKAELISKHLYRVQKISKVSAGNSFVRDIVFRHHLETTVKEVKELKDISYIQLKSLEGLRNIKKVRINHIGKIVQVGEY

SEQ ID NO: 629 - protein, 1145 aa, Riemerella anatipestifer
MKTILGLDLGTNSIGWALVKETENSNEKSEIIKLGVRVNPLTVDEKTNFEAGRPLSTNADRTAKRSARRNLQRYKLRRKNLIDLLIKHRLIDKDTPLTEIGKNTTHQTLELRAKAARERIELEDLARVFLAINKKRGYRSSRKVNNEEEGQVVDGMAVAKKLYDENLTPGQYAYELLSKGKKYVPDFYRSDLQAEFDSIWEYQKQFYADILDDELYNALKGQGQQNSRKRFLAIKGVYTAENKGKRDEVKLQHYKWRSEAITQKLSIEEVAYVLVEINNDLNKSSGYLGAISDRSKELYFNKETVGENLWKQIQKNPHTSLKNQVFYRQDYLDEFEQIWETQAQFHPQLTLALKEQIRDVVIFYQRKLKSQKGLLSFCQFESWEIERKDENGNVILNKTTQLPKRQTVGRRVAPKSSPLFQEFKIWQNINNLEIAKISDGNSKNKKETEALSDDERKLLFEELNLRGNLSQKEVLQILGLKDKEYKTNFPEGLEGNRTNAALFNIYQQIAENEGYGDWTKKSAQEIKEELKAVFPQIGIQADILDFNAELDGKEFENQASYQLWHLLYSAEEDDKINEEDQIIYGNSAVSLKKKLCEKFGFTPEYAKWIANVSLQDDYGNLSTKAMRKIIPYLIDGNDYSEACALAGYNHSNSLTKEENDNRERLNKLELLPKNSLRNPVVEKILNQMVNVVNQVIETYGKPDEVRIELARELKKSAEERAEMTKGINEATRRNEDIKKLITKNFGIPNPTKNDVVRYRLWEELAPLAYKDVFTGRQIKKEDLFSSKIDIEHIIPKALLFDDSFSNKTLAFRETNLKKADRTAYGFIESDYNATLDDYIQRVETLYNNAKGTISKGKRNKLLMAQKNLPDGFIERDLRNSQYIAKKAKSMIEKVFNDVNVTSGSITDRLREDWDLINVMKELNFPKYKALGLTEIEERYDIGQEKTKKVEVITDWTKRNDHRHHAMDALTVAFTTKSHVQYLNNLNTIHSLKGDEVDLELSKLYGLKNTITEVVNKKRKFIPPMPNFREEAKKHIETILVSIKNKNKVYTKNINKTKKESGYHTKEQLTPRGQLHKETVYGKSKRPMNKPTKINKNFSLEQAQLIINVQEKELVLRHLAQFDNNPAVAFDTKTLKKCHYLKMVNL

SEQ ID NO: 630 - protein, 1400 aa, Riemerella anatipestifer
MKTILGLDLGTNSIGWALVKETENSNEKSEIIKLGVRVNPLTVDEKTNFEAGRPLSTNADRTAKRSARRNLQRYKLRRKNLIDLLIKHRLIDKDTPLTEIGKNTTHQTLELRAKAARERIELEDLARVFLAINKKRGYRSSRKVNNEEEGQVVDGMAVAKKLYDENLTPGQYAYELLSKGKKYVPDFYRSDLQAEFDSIWEYQKQFYADILDDELYNALKGQGQQNSRKRFLAIKGVYTAENKGKRDEVKLQHYKWRSEAITQKLSIEEVAYVLVEINNDLNKSSGYLGAISDRSKELYFNKETVGENLWKQIQKNPHTSLKNQVFYRQDYLDEFEQIWETQAQFHPQLTLALKEQIRDVVIFYQRKLKSQKGLLSFCQFESWEIERKDENGNVILNKTTQLPKRQTVGRRVAPKSSPLFQEFKIWQNINNLEIAKISDGNSKNKKETEALSDDERKLLFEELNLRGNLSQKEVLQILGLKDKEYKTNFPEGLEGNRTNAALFNIYQQIAENEGYGDWTKKSAQEIKEELKAVFPQIGIQADILDFNAELDGKEFENQASYQLWHLLYSAEEDDKINEEDQIIYGNSAVSLKKKLCEKFGFTPEYAKWIANVSLQDDYGNLSTKAMRKIIPYLIDGNDYSEACALAGYNHSNSLTKEENDNRERLNKLELLPKNSLRNPVVEKILNQMVNVVNQVIETYGKPDEVRIELARELKKSAEERAEMTKGINEATRRNEDIKKLITKNFGIPNPTKNDVVRYRLWEELAPLAYKDVFTGRQIKKEDLFSSKIDIEHIIPKALLFDDSFSNKTLAFRETNLKKADRTAYGFIESDYNATLDDYIQRVETLYNNAKGTISKGKRNKLLMAQKNLPDGFIERDLRNSQYIAKKAKSMIEKVFNDVNVTSGSITDRLREDWDLINVMKELNFPKYKALGLTEIEERYDIGQEKTKKVEVITDWTKRNDHRHHAMDALTVAFTTKSHVQYLNNLNTIHSLKGDEVDLELSKLYGLKNTITEVVNKKRKFIPPMPNFREEAKKHIETILVSIKNKNKVYTKNINKTKKESGYHTKEQLTPRGQLHKETVYGKSKRPMNKPTKINKNFSLEQAQLIINVQEKELVLRHLAQFDNNPAVAFDTKTLKKMPLLKNGEPLKEVLCFEEIFTIRKDITPDLKIEKVVDEKIKAILEQRKKDFGGNAKEAFSDLDKNPIWLNKEKGICIKRVTITGVSNAEALHHQKDHLGREILDDNGNPIPADFVSTGNNHHVAIYEDEKGKLQEKVVSLYEAVARANQGLPVVDKGLNEDLGWKFLFTMKQNEMFVFPNDDFDVNDIDLLDENNAKIISQHLFRVQKLATKNYMFRHHLETNVQEVKELNDIAYKSIRSTEPLKNIKKVRINHIGKIVQVGEY

SEQ ID NO: 631 - protein, 1128 aa, Roseburia intestinalis
MDEKMDYRIGLDIGIASVGWAVLQNNSDDEPVRIVDLGVRIFDTAEIPKTGESLAGPRRAARTTRRRLRRRKHRLDRIKWLFENQGLINIDDFLKRYNMAGLPDVYQLRYEALDRKLTDEELAQVLLHIAKHRGFRSTRKAETAAKENGAVLKATDENQKRMQEKGYRTVGEMIYLDEAFRIGCSWSEKGYILTPRNKAENYQHTMLRAMLVEEVKEIFSSQRRLGNKKATEELEEKYLEIMTSQRSFDLGPGMQPDGKPSPYAMEGFSDRVGKCTFLGDQGELRGAKGTYTAEYFVALQKINHTKLVNQDGETRNFTEEERRALTLLLFTQKEVKYAAVRKKLGLPEDILFYNLNYKKAATKEEQQKENQNTEKAKFIGMPYYHDYKKCLEERVKYLTENEVRDLFDEIGMILTCYKNDDSRTERLAKLGLVPIEMEGLLAYTPTKFQHLSMKAMRNIIPFLEKGMTYDKACEEAGYDFKADSKGTKQKLLTGENVNQTINEITNPVVKRSVSQTVKVINAIIRTYGSPQAINIELAREMSKTFEERRKIKGDMEKRQKNNEDVKKQIQELGKLSPTGQDILKYRLWQEQQGICMYSGKTIPLEELFKPGYDIDHILPYSITFDDSFRNKVLVTSQENRQKGNRTPYEYMGNDEQRWNEFETRVKTTIRDYKKQQKLLKKHFSEEERSEFKERNLTDTKYITTVIYNMIRQNLEMAPLNRPEKKKQVRAVNGAITAYLRKRWGLPQKNRETDTHHAMDAVVIACCTDGMIQKISRYTKVRERCYSKGTEFVDAETGEIFRPEDYSRAEWDEIFGVHIPKPWETFRAELDVRMGDDPKGFLDTHSDVALELDYPEYIYENLRPIFVSRMPNHKVTGAAHADTIRSPRHFKDEGIVLTKTALTDLKLDKDGEIDGYYNPQSDLLLYEALKKQLLLYGNDAKKAFAQDFHKPKADGTEGPVVRKVKIQKKQTMGVFVDSGNGIAENGGMVRIDVFRVNGKYYFVPVYTADVVKKVLPNRASTANKPYSEWRTMEDKDFLFSLYSRDLVHIKSKKGIPIKNVDGSLGESKEVYAYYIGADISGAKIEGKAHDSRYTFRGIGVQKLELIEKCQVDILGHISTVKNEKRMGFS

SEQ ID NO: 632 - protein, 1471 aa, Scardovia wiggsiae
MGYKAPRNDKGEIDYGVGLDLGNGSVGWVAMDKDYHLIRARGHELIGARLFDPANSAENRRESRTTRRRLSRRRWRLRMLDSLFASELAKIDPNFLARRKYSWVHPKDEQNHENWYGSIIFGSKEQDKQFYKDYPTIYHLRKKLTEDTERHDIREIYVAIHHIVKYRGHFLREGEINSENLFDPEGFVELIKDVIKLNNSYDESTPIFEASPADVSEALLNEHTSRSGRIEDTLDKLDFSVSRVDKHELKGMRDAAKAVIGAIVGNTADFSKIFNLDNLDKDSKDNLKLKFADSNFDEKYGGVVGSGLLDETQIELVDRIHAVYDAVALKGILGDAHTISEAKVESYEKHRKNWKLIKEELRTKENKDEVDLWYGDLSGRQYKNPPDPEKGPDEGSKKDSPIRDSDQKQNLIKKANDYFTELIDDSQLSEEQKNCLKNDINNGQLFPVQRSSDNGVIPYQIHLNELRRIIENQKQYYPFLAETFIRKTAEGKSYEENKIVALLKFRVPYYVGPLVSKEDMEEHSSGNSAYHWMARNPGRGEAITPWNFDEVVDKDESGARFISRLTGTDTYLLGEPTLPQHSLLYEEYMVLSELNNVRLNVRQGNHWSDKNRQRLSYKQKEFLIENLFKEHKTVTRKRAEDCLSSMGCGEVQLFGLSDEKKFASSLSSYITLKKILGKAFVDDSGNSAILERIIEVQTVFEDREPLTHQLSLIDSLTVEQRKQLAKIHYTGWGKLSRKLLTSKKGSYKIHSQNEIMRTQHSIIDIMRGDSLNLIEIIRDKKIGIGEWIDNENLDRETGESDVSRLESVFEGIVMSPRVKRGVVQAVRVIDDLAKAIGNPPQRIFIEMADEVQASQRTVSRLSRLKALYGSPSLQKEFNDLKDLRKSLNETKDADLQEDRLYLYYIQLGKDLYTGKEISIDSLSSAYDIDHIVPQALTQDDSIDNRVLVSRKENARKTDSYLYTPDLIKNMRPLWGKLLAAGLMSQKKYDALTRVDDFKDREKQRFVQRSLVETRQIMKNVSTILRTYYGEDTNVVTLKSSITHDMRKYLGFPYKNRDINDYHHAQDALCISAAGQFMLNRHFVSGGEVTDGASNAYNMYLAEYLQEFRDAKARGERKRSTAFGFVVGSMSSKDDEKRTDHRTGEIVWSETNAEYLRKVMNYKKMLITQKVGDVKTRALYDETRYGHKESSAKSIKFDNLRRDTSLYGGFSGASTAYMMLVEYKKKNKLVSITAQEASLLAVADQKNDTVSVMDGILASHGLSGAKILLPKIVTGQLLDYSDALVTLQSASELNTARQMWLPRNDYNDIDIILKSKDIEDAAHKLGYDSDTVHVLRRIQKLFEAVFRVAESQFPLHQLSKDQQEEILRDPQNYGFGSAVKLLGGLLKALHANAENTNLAGLVKVLHGDKEYSDDGKAKEFKKFGFSPRWRRISNPTGFTLSDSDTFIYQSPSGIFEQRVTVKELKEKADKQK

SEQ ID NO: 633 - protein, 116 aa, Sphingobacterium spiritivorum
MFRKYFEEKNSARLLFTLKQGDFVYVPDDNEEVILDESSPLFIDYWKNISERSNNIHVVQKFSGKEIYFLKHTIADTIAKKIEFGSQDCYQSLNGKSIKEFCIKIDSDRLGNISKV

SEQ ID NO: 634 - protein, 1306 aa, Sphingobacterium spiritivorum; identical to SEQ ID NO: 98

SEQ ID NO: 635 - protein, 1110 aa, Sphingobium sp.
MAEGKKRIWRLGADLGANSLGWAAIELSAPVNGKPIAILAAGSRIFSDGRDPKSGASLAVDRRDARAMRRRRDRFKQRQKALIKYLIADGLFPADEAARNAMAAIDPYAVRARALDEALSLPELGRALFHLNQRRGFKSNRKADRKADDDAGKIAIGIDRTRDAIAEDEADAGAEPGSWTFGKWLHERRLKGQSVRTRLRPESGEDAKGDGYDFYPDRALMEEEFDAIWAAQAPHHPDVLTNDVHDRLHEIIFYQRPLKAPQVGMCSLIPGDRRLPKAHPLFQRRRLLEELNALMIVRPGEVAQRLTREERDILLLKLKDKNKVSFATLRKALKLDPDARFNKESEDRTDLKGDEVAAVMGSKTRFGNLWVHLSIEAQWDVLARLDAVESDAEDAAFCAWLVETYALTPEQARAVANAPLPPGYGRFGETATRKLIEALRDGKKDDRVLVYSEAVTEAGLGHHSDRRTGEVFEDAKGRPQLPYYGVALERHIMPGTGDPSDPEEMRVGRLTNPTVHIGLNQLRRILNVLIRAYGPPAEIAIELARELKLTDEDKKRINRENNDNRIAAERRSEKLLAIGQADSGANRALLKLWEELNPANVLDRRCIYSGRQISIDMLFSAAVEVDHILPFAATLDDSNGNKIVCLREANREKRKRSPHDAWGHSARWDEIAARAAQLPRNKRWRFEPDAMDKFRDEGGFQARHLVDTQYLARLSREYLATLYPEKGEGSGHIWVSPGRLTEMVRRKLGLNDLLPDHNFGGGADQAKNRLDHRHHAIDAVVVAIVDRGMLNAIARASGQEGAEGRERIIIPEPWDGFRDALRETVNRITVSHRTDHGTASKAGLPKGKDATAGRLHNDTAYGFTGDTDAKGNSIVVRRVPLSSFKKLADLDRIRDADLKAALYQHLNGLEGKAFEKALAEFHKLEWHNFGGVRRVRVTEPLTVIPIKDRNGRIYKGYKGDSNYRYDVWELPDGKWVTNWKNEAGEAMSSVISMFDAHQSSEPPRPHPAARKILSLHQNDLLAIEREGEDRKLMRVVKFGQSGQITLAEHQQAGDLKKRDAVSNDDDPFKYFAPTSGGLKKVKARQVRIDEIGRVLDPGFPARTARRKTRG

SEQ ID NO: 636 - protein, 1084 aa, Sporolactobacillus vineae
MKYSIGLDIGISSVGWSVINLDRERIELMGARLFDAAENPKNGSSLAAPRRDARSARRRLRRRRYRVGRVRHFIIDRGLVTRGQADQLFDWKDGDLDIWLVRVNALERLLTDREFARVLIHIAKNRGYRSNRKSEAKSGENGQVLSAIKANKELMEEKGYQTVAEMLVNEPETFAGRKRNRGGEYTHVIARSELEHEIRLIFTKQRAFGNRFATEENENTYVKIWAAQRPVATKDDILKKIGDCTFEKGEKRAPKASYAFQYFRALDKLNRLRILSVREPSRNLTDDERNLIVPALFNHDKQKYSDLRKILQLRDDQKFNELFYDPGKSLKENENKTFLSLAEQYKIRKVIRDVQGKDGLLQYRPLDIDTIAYALTVFKDDQDTRDYLSNTFVNGNGKQVLNLANRAFDAELIDGLLSLSFAKFGHLSLKALHKLIPHMEQGLSYYDACKKVGYHDNEQVGKSKQHLLPVIPADEIRNPVVVRSLSQTRKVINAIIKRYGSPTFMYIELAREMGRPYNERRDLEKQYNKNRTVNDSAIEQIHELYPEIGAPRGHDILKYKLWQQQDCKCAYSLEKIPAEKIFEPGYAEVDHIIPYSRSFDDSNSNKVLVLSRMNQEKKNRTPYEWFGGDEHRWNKFESYVNALKVNRKKKSLLTKKNMDTEEEDTFKSRHLNDTRYITRFIKSFVEDNLLFREIEGAKQHVFTVNGAYTSLMRKRWGFNKNREESDLHHSVDAVIIAVSQPFRNEVSRYFKHREISLPQLLKRTWDYFPEPWEGFVKELRARTLQDPEKLKLALESLDLDSYDPEFIDEVKPIFISRMPKRSIKGQIHDETLRRNRGKTKDGFVKIVTRTRLENIKFDKNGDFPMYGRESDPKTYQAIKQRYLENNKDKKKAFIEPLYKPAKNPNNASLIRSVKIEDKANQIVPLRDEAVAYNASIVRTEVYRNKETGKFYLAPVYVSDVFAGREPRRFIRANVPYEQWVNITDKFTFLFNLYPNDVIYIKMKKVKTTKSNINKTISWQESYFYFKGTDIHTGAITIIDHMNSFTDRVGTQGLQLFEKYQVDPLGNLSRVHGETQYGVPALSHS

SEQ ID NO: 637 - protein, 475 aa, Staphylococcus massiliensis
MGQDYILGLDIGITSVGYGLIDYHDKSVIDAGVRLFKEANVENNEGRRSKRGSRRLQRRRKHRLARTRNLLESYQLNPFPKCEKNPYEIRVKGFKEVLTSDELSAALLHLAKRRGIDNVHVTDTESDSSDNGLSTKEQLAKNQKALESRYVCELQLERLLNDNKVRGANNRFKTQDFVREAKQILSIQKDHHNLDQVFIDKYISLLETRREYYEGPGKGSPYGWDGDIKKWYELLMGRCTYFPESLRSVKYAYSADLFNALNDLNNLVIVRDENDKLTYPEKYHIVENVFKQRKKPTLKQIAKEIDVAPEDIRGYRVTASGTPVFTSFKLYHDIKSVTSNDKVLEDTELLDAIAEVLTIYQSPIEVQEKLESLNVILTKEEIEGISKLTGYTGTHALSLKAIQIVIDELWETNDNQMTIFTRLNMKPQKVDLAKANKIPTSLVEDFIISPVAKRAFIQSIKVINAVIKNMVCLKI

SEQ ID NO: 638 - protein, 581 aa, Staphylococcus massiliensis
MPKDIIIELAREKNSDEERKIIRDVQKRNQQTRDLVDKVIKETGKTKAKGMVEKLILHDKQEGKCLYSLKSIPLEDLLNNPHHYEVDHIIPRSVSYDNSMNNKVLVLQEENSKKSNQTPFQYFNSSNTHITFKQFKQHVLNLSKTKDRITKKKKEYLLEERDINKFSVQKEFINRNLVDTRYATRELMTLLRAYFSANELDVKVKAINGGFTSYLRKRWDFKKDRNAGYKHHAEDALIIANVDFIFKQLKALDNAKKVMEGRKVQVEKDNVEDNEHYESLFREPDQIKEIKLYDNYKFSHRVDKKPNRELINDTIYSTRKVDNKTYTIQTVNNIYDKQNDQLKKLFNKSPEKFLMYKHDPKTFDKLATIMRQYKNEKNPLYKFHDETGEYLTKYAKKDNGPIVKSLKYIGKQVNAHLDITNDYENSNNKVVKLSLKPFRFDVYLDDGKYKFVTVKYLDIIKKDTYYVIDEEKYKLALQQKKISENAKFIGSFYNNDLIKINGELLRVIGVNDDAKNTLELNMIDISYRDYVENMNLATTPRIRKNIGKSITILEKYTTDILGNTFKISSPEKPQFIFKVRD

SEQ ID NO: 639 - protein, 1334 aa, Staphylococcus pseudintermedius; identical to SEQ ID NO: 205

SEQ ID NO: 640 - protein, 1112 aa, Staphylococcus simulans; identical to SEQ ID NO: 252

SEQ ID NO: 641 - protein, 773 aa, Streptococcus agalactiae
MNKPYSIGLDIGTNSVGWSIITDDYKVPAKKMRVLGNTDKEYIKKNLIGALLFDGGNTAADRRLKRTARRRYTRRRNRILYLQEIFAEEMSKVDDSFFHRLEDSFLVEEDKRGSKYPIFATLQEEKDYHEKFSTIYHLRKELADKKEKADLRLIYIALAHIIKFRGHFLIEDDSFDVRNTDISKQYQDFLEIFNTTFENNDLLSQNVDVEAILTDKISKSAKKDRILAQYPNQKSTGIFAEFLKLIVGNQADFKKYFNLEDKTPLQFAKDSYDEDLENLLGQIGDEFADLFSAAKKLYDSVLLSGILTVIDLSTKAPLSASMIQRYDEHREDLKQLKQFVKASLPEKYQEIFADSSKDGYAGYIEGKTNQEAFYKYLSKLLTKQEDSENFLEKIKNEDFLRKQRTFDNGSIPHQVHLTELKAIIRRQSEYYPFLKENQDRIEKILTFRIPYYIGPLAREKSDFAWMTRKTDDSIRPWNFEDLVDKEKSAEAFIHRMTNNDFYLPEEKVLPKHSLIYEKFTVYNELTKVRYKNEQGETYFFDSNIKQEIFDGVFKEHRKVSKKKLLDFLAKEYEEFRIVDVIGLDKENKAFNASLGTYHDLEKILDKDFLDNPDNESILEDIVQTLTLFEDREMIKKRLENYKDLFTESQLKKLYRRHYTGWGRLSAKLINGIRDKESQKTILDYLIDDGRSNRNFMQLINDDGLSFKSIISKAQAGSHSDNLKEVVGELAGSPAIKKGILQSLKIVDELVKVMGYEPEQIVVEMARENQTTNQ

SEQ ID NO: 642 - protein, 1370 aa, Streptococcus agalactiae
MNKPYSIGLDIGTNSVGWSIITDDYKVPAKKMRVLGNTDKEYIKKNLIGALLFDGGNTAADRRLKRTARRRYTRRRNRILYLQEIFAEEMSKVDDSFFHRLEDSFLVEEDKRGSKYPIFATMQEEKDYHEKFPTIYHLRKELADKKEKADLRLVYLALAHIIKFRGHFLIEDDRFDVRNTDIQKQYQAFLEIFDTSFENNHLLSQNVDVEAILTDKISKSAKKDRILAQYPNQKSTGIFAEFLKLIVGNQADFKKHFNLEDKTPLQFAKDSYDEDLENLLGQIGDEFADLFSAAKKLYDSVLLSGILTVTDLSTKAPLSASMIQRYDEHREDLKQLKQFVKASLPEKYQEIFADSSKDGYAGYIEGKTNQEAFYKYLSKLLTKQEDSEYFLEKIKNEDFLRKQRTFDNGSIPHQVHLTELKAIIRRQSEYYPFLKENQDKIEKILTFRIPYYVGPLARGNSDFAWMTRKTDDSIRPWNFEDLVDKEKSAEAFIHRMTNNDLYLPEEKVLPKHSLIYEKFTVYNELTKVRYKNEQGETYFFDSNVKQEIFDGVFKEHRKVSKKQLLDFLAKEFEEFRIVDVTGLDKENKAFNASLGTYHDLKKILDKDFLDNPDNESILEDIVQTITLFEDREMIKKRLENYKDLFTESQLKKLYRRHYTGWGRLSAKLINGIRDRESQKTILDYLISDGRANRNFMQLINDDGLSFKSIISKAQSGSHSDNLKEVVGELAGSPAIKKGILQSLKIVDELVKVMGYEPEQIVVEMARENQTTNQGRRNSRQRYKLLEDGVKNLASDLNGDILKEYPTDNQALQNERLFLYYLQNGRDMYTGEALDIDNLSQYDIDHIVPQAFIKDDSIDNRVLVSSAKNRGKSDDVPSIDIVKARKAFWKKLLDAKLISQRKYDNLTKAERGGLTPDDKAGFIQRQLVETRQITKHVARILDERFNNKVDDNNKPIRKVKIVTLKSNLVSNFRKEFGFYKIREVNNYHHAHDAYLNAVVAKAILTKYPQLEPEFVYGDYPKYNSYKTRKSATEKLFFYSNIMNFFKTKVTLADETVVVKDDIEVNNETGEIAWDKKKHFATVRKVLSYPQVNIVKKTEVQTGGFSKESILAHSNSDKLIPRKTKDIYLDPKKYGGFDSPIVAYSVLVLADIKKGKAQKLKTVKELIGITIMERERFEKNPSAFLESKGYLNIRTDKLIILPKYSLFELENGRRRLLASAGELQKGNELALPTQYMKFLYLASRYNESKGKPEEIEKKQEFVNQHVSYFDDILQLINDFSKRVILADANLEKINKLYSDNKDNTPVDELAKNIINLFTFTSLGAPAAFKFFDKSVDRKRYTSTKEVLDSTLIHQSITGLYETRIDLGKLGED

SEQ ID NO: 643 - protein, 1370 aa, Streptococcus agalactiae
MNKPYSIGLDIGTNSVGWSIITDDYKVPAKKMRVLGNTDKEYIKKNLIGALLFDGGNTAADRRLKRTARRRYTRRRNRILYLQEIFAEEMSKVDDSFFHRLEDSFLVEEDKRGSKYPIFATMQEEKDYHEKFPTIYHLRKELADKKEKADLRLVYLALAHIIKFRGHFLIEDDRFDVRNTDIQKQYQAFLEIFDTSFENNHLLSQNVDVEAILTDKISKSAKKDRILAQYPNQKSTGIFAEFLKLIVGNQADFKKHFNLEDKTPLQFAKDSYDEDLENLLGQIGDEFADLFSAAKKLYDSVLLSGILTVTDLSTKAPLSAYMIQRYDEHREDLKQLKQFVKASLPEKYQEIFADSSKDGYAGYIEGKTNQEAFYKYLSKLLTKQEDSEYFLEKIKNEDFLRKQRTFDNGSIPHQVHLTELKAIIRRQSEYYPFLKENQDKIEKILTFRIPYYVGPLARGNSDFAWMTRKTDDSIRPWNFEDLVDKEKSAEAFIHRMTNNDLYLPEEKVLPKHSLIYEKFTVYNELTKVRYKNEQGETYFFDSNVKQEIFDGVFKEHRKVSKKQLLDFLAKEFEEFRIVDVTGLDKENKAFNASLGTYHDLKKILDKDFLDNPDNESILEDIVQTITLFEDREMIKKRLENYKDLFTESQLKKLYRRHYTGWGRLSAKLINGIRDRESQKTILDYLISDGRANRNFMQLINDDGLSFKSIISKAQSGSHSDNLKEVVGELAGSPAIKKGILQSLKIVDELVKVMGYEPEQIVVEMARENQTTNQGRRNSRQRYKLLEDGVKNLASDLNGDILKEYPTDNQALQNERLFLYYLQNGRDMYTGEALDIDNLSQYDIDHIVPQAFIKDDSIDNRVLVSSAKNRGKSDDVPSIDIVKARKAFWKKLLDAKLISQRKYDNLTKAERGGLTPDDKAGFIQRQLVETRQITKHVARILDERFNNKVDDNNKPIRKVKIVTLKSNLVSNFRKEFGFYKIREVNNYHHAHDAYLNAVVAKAILTKYPQLEPEFVYGDYPKYNSYKTRKSATEKLFFYSNIMNFFKTKVTLADETVVVKDDIEVNNETGEIAWDKKKHFATVRKVLSYPQVNIVKKTEVQTGGFSKESILAHSNSDKLIPRKTKDIYLDPKKYGGFDSPIVAYSVLVLADIKKGKAQKLKTVKELIGITIMERERFEKNPSAFLESKGYLNIRTDKLIILPKYSLFELENGRRRLLASAGELQKGNELALPTQYMKFLYLASRYNESKGKPEEIEKKQEFVNQHISYFDDILQLINDFSKRVILADANLEKINKLYSDNKDNTPVDELAKNIINLFTFTSLGAPAAFKFFDKSVDRKRYTSTKEVLDSTLIHQSITGLYETRIDLGKLGED

SEQ ID NO: 644 - protein, 1378 aa, Streptococcus agalactiae
MNKPYSIGLDIGTNSVGWSIITDDYKVPAKKMRVLGNTDKEYIKKNLIGALLFDGGNTAADRRLKRTARRRYTRRRNRILYLQEIFAEEMSKVDDSFFHRLEDSFLVEEDKRGSKYPIFATMQEEKYYHEKFPTIYHLRKELADKKEKADLRLIYLALAHIIKFRGHFLIEDDRFDVRNTDIQKQYQAFLEIFDTTFENNDLLSQNVDVEAILTDKISKSAKKDRILARYPNQKSTGIFAEFLKLIVGNQADFKKHFNLEDKTPLQFAKDSYDEDLENLLGQIGDEFADLFSAAKKLYDSVLLSGILTVIDLSTKAPLSASMIQRYDEHHEDLKHLKQFVKASLPENYREVFADSSKDGYAGYIEGKTSQEAFYKYLLKLLTKQEGSEYLLEKIKNEDFLRKQRTFDNGSIPHQVHLTELRAIIRRQSEYYPFLKENLDRIEKILTFRIPYYVGPLAREKSDFAWMTRKTDDSIRPWNFEDLVDKEKSAEAFIHRMTNNDLYLPEEKVLPKHSLIYEKFTVYNELTKVRFLAEGFKDFQFLNRKQKETIFNSLFKEKRKVTEKDIISFLNKVDGYEGIAIKGIEKQFNASLSTYHDLKKILGKDFLDNTDNELILEDIIQTLTLFEDREMIKKRLDIYKDFFTESQLKKLYRRHYTGWGRLSAKLINGIRNKENQKTILDYLIDDGSANRNFMQLIKDAGLSFKPIIDKARTGSHSDNLKEVVGELAGSPAIKKGILQSLKIVDELVKVMGYEPEQIVVEMARENQTTAKGLSRSRQRLTTLRESLGNLKSNILEEKKPKYVKDQVENHHLSDDRLFLYYLQNGKDMYTDDELDIDNLSQYDIDHIIPQAFIKDDSIDNRVLVSSAKNRGKSDDVPSIEIVKARKMFWKNLLDAKLMSQRKYDNLTKAERGGLTSDDKARFIQRQLVETRQITKHVARILDERFNNELDSKGRRIRKVKIVTLKSNLVSNFRKEFGFYKIREVNNYHHAHDAYLNAVVAKAILTKYPQLEPEFVYGLYRRKKLSKIVREDKEEKYSEATRKMFFYSNLMNMFKRVVRLADGSIVVRPVIETGRYMGKTAWDKKKHFATVRKVLSYPQNNIVKKTEIQTGGFSKESILAHGNSDKLIPRKTKDIYLDPKKYGGFDSPIVAYSVLVVADIKKGKAQKLKTVTELLGITIMERSRFEKNTSAFLESKGYLNIRDDKLMILPKYSLFELENGRRRLLASAGELQKGNELALPTQFMKFLYLASRYNESKGKPEEIEKKQEFVNQHVSYFDDILQLINDFSNRVILADANLEKINKLYQDNKENIPVDELANNIINLFTFTSLGAPAAFKFFDKIVDRKRYTSTKEVLNSTLIHQSITGLYETRIDLGKLGEG

SEQ ID NO: 645 - protein, 1370 aa, Streptococcus agalactiae
MNKPYSIGLDIGTNSVGWSIITDDYKVPAKKMRVLGNTDKEYIKKNLIGALLFDGGNTAADRRLKRTARRRYTRRRNRILYLQEIFAEEMSKVDDSFFHRLEDSFLVEEDKRGSKYPIFATMQEEKYYHEKFPTIYHLRKELADKKEKADLRLIYLALAHIIKFRGHFLIEDDRFDVRNTDIQKQYQAFLEIFDTTFENNDLLSQNVDVEAILTDKISKSAKKDRILARYPNQKSTGIFAEFLKLIVGNQADFKKHFNLEDKTPLQFAKDSYDEDLENLLGQIGDEFADLFSAAKKLYDSVLLSGILTVTDLSTKAPLSASMIQRYDEHREDLKQLKQFVKASLPEKYQEIFADSSKDGYAGYIEGKTNQEAFYKYLSKLLTKQEGSEYLLEKIKNEDFLRKQRTFDNGSIPHQVHLTELRAIIRRQSEYYPFLKENLDRIEKILTFRIPYYVGPLAREKSDFAWMTRKTDDSIRPWNFEDLVDKEKSAEAFIHRMTNNDLYLPEEKVLPKHSLIYEKFTVYNELTKVRFLAEGFKDFQFLNRKQKETIFNSLFKEKRKVTEKDIISFLNKVDGYEGIAIKGIEKQFNASLSTYHDLKKILGKDFLDNTDNELILEDIVQTLTLFEDREMIRKRLDIYKDFFTESQLKKLYRRHYTGWGRLSAKLINGIRNKENQKTILDYLIDDGSANRNFMQLIKDAGLSFKPIIDKARTGSHSDNLKEVVGELAGSPAIKKGILQSLKIVDELVKVMGYEPEQIVVEMARENQTTAKGLSRLRQRLTTLRESLANLKSNILEEKKPKYVKDQVENHHLSDDRLFLYYLQNGKDMYTDDELDIDNLSQYDIDHIIPQAFIKDDSIDNRVLVSSAKNRGKSDDVPSVEIVKDCKVFWKKLLDAKLMSQRKYDNLTKAERGGLTSDDKARFIQRQLVETRQITKHVARILDERFNNELDSKGRRIRKVKIVTLKSNLVSNFRKEFGFYKIREVNNYHHAHDAYLNAVVAKAILTKYPQLEPEFVYGDYPKYNSYKTRKSATEKLFFYSNIMNFFKTKVTLADGTVVVKDDIEVNNDTGEIVWDKKKHFATVRKVLSYPQVNIVKKTEIQTGGFSKESILAHGNSDKLIPRKTKDIYLDPKKYGGFDSPIVAYSVLVVADIKKGKAQKLKTVTELLGITIMERSRFEKNPSAFLESKGYLNIRDDKLMILPKYSLFELENGRRRLLASADELQKGNELALPTQFMKFLYLASRYNELKGKPEEIEQKQEFVVQHVSYFDDILQIINDFSNRVILADANLEKINKLYQDNKENIPVDELANNIINLFTFTSLGAPAAFKFFDKIVDRKRYTSTKEVLNSTLIHQSITGLYETRIDLGKLGED

SEQ ID NO: 646 - protein, 1377 aa, Streptococcus agalactiae
MNKPYSIGLDIGTNSVGWSIITDDYKVPAKKMRVLGNTDKEYIKKNLIGALLFDGGNTAADRRLKRTARRRYTRRRNRILYLQEIFAEEMSKVDDSFFHRLEDSFLVEEDKRGSKYPIFATMQEEKYYHEKFPTIYHLRKELADKKEKADLRLVYLALAHIIKFRGHFLIEDDRFDVRNTDIQKQYQAFLEIFDTTFENNHLLSQNVDVEAILTDKISKSAKKDRILAQYPNQKSTGIFAEFLKLIVGNQADFKKHFNLEDKTPLQFAKDSYDEDLENLLGQIGDEFADLFSVAKKLYDSVLLSGILTVTDLSTKAPLSASMIQRYDEHHEDLKHLKQFVKASLPENYREVFADSSKDGYAGYIEGKTNQEAFYKYLLKLLTKQEGSEYFLEKIKNEDFLRKQRTFDNGSIPHQVHLTELRAIIRRQSEYYPFLKENQDRIEKILTFRIPYYVGPLAREKSDFAWMTRKTDDSIRPWNFEDLVDKEKSAEAFIHRMTNNDLYLPEEKVLPKHSLIYEKFTVYNELTKVRFLAEGFKDFQFLNRKQKETIFNSLFKEKRKVTEKDIISFLNKVDGYEGIAIKGIEKQFNASLSTYHDLKKILGKDFLDNTDNELILEDIVQTLTLFEDREMIKKCLDIYKDFFTESQLKKLYRRHYTGWGRLSAKLINGIRNKENQKTILDYLIDDGSANRNFMQLINDDDLSFKPIIDKARTGSHSDNLKEVVGELAGSPAIKKGILQSLKIVDELVKVMGYEPEQIVVEMARENQTTAKGLSRSRQRLTTLRESLANLKSNILEEKKPKYVKDQVENHHLSDDRLFLYYLQNGRDMYTKKALDIDNLSQYDIDHIIPQAFIKDDSIDNRVLVSSAKNRGKSDDVPSIEIVKARKMFWKNLLDAKLMSQRKYDNLTKAERGGLTSDDKARFIQRQLVETRQITKHVARILDERFNNEVDNGKKICKVKIVTLKSNLVSNFRKEFGFYKIREVNDYHHAHDAYLNAVVAKAILTKYPQLEPEFVYGMYRQKKLSKIVHEDKEEKYSEATRKMFFYSNLMNMFKRVVRLADGSIVVRPVIETGRYMGKTAWDKKKHFATVRKVLSYPQNNIVKKTEIQTGGFSKESILAHGNSDKLIPRKTKDIYLDPKKYGGFDSPIVAYSVLVVADIKKGKAQKLKTVTELLGITIMERSRFEKNPSAFLESKGYLNIRDDKLMILPKYSLFELENGRRRLLASAGELQKGNELALPTQFMKFLYLASRYNESKGKPEEIEKKQEFVNQHVSYFDDILQLINDFSKRVILADANLEKINKLYQDNKENIPVDELANNIINLFTFTSLGAPAAFKFFDKIVDRKRYTSTKEVLNSTLIHQSITGLYETRIDLGKLGED

SEQ ID NO: 647 - protein, 1370 aa, Streptococcus agalactiae
  misc_feature (117)..(117): Xaa can be any naturally occurring amino acid
MNKPYSIGLDIGTNSVGWSIITDDYKVPAKKMRVLGNTDKEYIKKNLIGALLFDGGNTAADRRLKRTARRRYTRRRNRILYLQEIFAEEMSKVDDSFFHRLEDSFLVEEDKRGSKYXIFATLQEEKDYHEKFSTIYHLRKELADKKEKADLRLIYIALAHIIKFRGHFLIEDDSFDVRNTDISKQYQDFLEIFNTTFENNDLLSQNVDVEAILTDKISKSAKKDRILAQYPNQKSTGIFAEFLKLIVGNQADFKKYFNLEDKTPLQFAKDSYDEDLENLLGQIGDEFADLFSAAKKLYDSVLLSGILTVIDLSTKAPLSASMIQRYDEHREDLKQLKQFVKASLPEKYQEIFADSSKDGYAGYIEGKTNQEAFYKYLSKLLTKQEDSENFLEKIKNEDFLRKQRTFDNGSIPHQVHLTELKAIIRRQSEYYPFLKENQDRIEKILTFRIPYYIGPLAREKSDFAWMTRKTDDSIRPWNFEDLVDKEKSAEAFIHRMTNNDFYLPEEKVLPKHSLIYEKFTVYNELTKVRYKNEQGETYFFDSNIKQEIFDGVFKEHRKVSKKKLLDFLAKEYEEFRIVDVIGLDKENKAFNASLGTYHDLEKILDKDFLDNPDNESILEDIVQTLTLFEDREMIKKRLENYKDLFTESQLKKLYRRHYTGWGRLSAKLINGIRDKESQKTILDYLIDDGRSNRNFMQLINDDGLSFKSIISKAQAGSHSDNLKEVVGELAGSPAIKKGILQSLKIVDELVKVMGYEPEQIVVEMARENQTTNQGRRNSRQRYKLLDDGVKNLASDLNGNILKEYPTDNQALQNERLFLYYLQNGRDMYTGEALDIDNLSQYDIDHIIPQAFIKDDSIDNRVLVSSAKNRGKSDDVPSLEIVKDCKVFWKKLLDAKLMSQRKYDNLTKAERGGLTSDDKARFIQRQLVETRQITKHVARILDERFNNELDSKGRRIRKVKIVTLKSNLVSNFRKEFGFYKIREVNNYHHAHDAYLNAVVAKAILTKYPQLEPEFVYGDYPKYNSYKTRKSATEKLFFYSNIMNFFKTKVTLADGTVVVKDDIEVNNDTGEIVWDKKKHFATVRKVLSYPQNNIVKKTEIQTGGFSKESILAHGNSDKLIPRKTKDIYLDPKKYGGFDSPIVAYSVLVVADIKKGKAQKLKTVTELLGITIMERSRFEKNPSAFLESKGYLNIRADKLIILPKYSLFELENGRRRLLASAGELQKGNELALPTQFMKFLYLASRYNESKGKPEEIEKKQEFVNQHVSYFDDILQLINDFSKRVILADANLEKINKLYQDNKENISVDELANNIINLFTFTSLGAPAAFKFFDKIVDRKRYTSTKEVLNSTLIHQSITGLYETRIDLGKLGED

SEQ ID NO: 648 - protein, 1370 aa, Streptococcus agalactiae
MNKPYSIGLDIGTNSVGYSVVTDDYKVPAKKMRVLGNTDKEYIKKNLIGALLFDGGNTASDRRLKRTARRRYTRRRNRILYLQEIFAEEMSKVDDSFFHRLEDSFLVEDDKRGSKYPIFATMQEEKDYHEKFPTIYHLRKELADKKEKADLRLVYLALAHIIKFRGHFLIEDDSFDVRNTDIQRQYQAFLEIFDTTFENNHLLSQNIDVEGILTDKISKSAKKDRILAQYPNQKSTGIFAEFLKLIVGNQADFKKHFNLEDKTPLQFAKDSYDEDLENLLGQIGDEFADLFSVAKKLYDSVLLSGILTVTDLSTKAPLSASMIQRYDEHREDLKQLKQFVKASLPEKYQEIFTDSSKDGYAGYIEGKTNQGAFYKYLSKLLTKQEGSEYFLEKIKNEDFLRKQRTFDNGSIPHQVHLTELKAIIRRQSEYYPFLKENLDRIEKILTFRIPYYVGPLAREKSDFAWMTRKTDDSIRPWNFEELVDKEASAEAFIHRMTNNDLYLPEEKVLPKHSLIYEKFTVYNELTKVRYKNEQGETYFFDSNIKQEIFDGVFKEHRKVSKKKLLDFLAKEYEEFRIVDVIGLDKENKAFNASLGTYHDLKKILDKDFLDNPDNESILEDIVQTLTLFEDREMIKKRLENYKDLFTESQLKKLYRRHYTGWGRLSAKLINGIRDKESQKTILDYLISDGRANRNFMQLIHDDGLSFKPIIDKAQAGSHSDNLKEVVGELAGSPAIKKGILQSLKIVDELVKVMGYEPEQVVVEMARENQTTNQGRRNTRQRYKLLEEGVKNLASDLNGNILKEYPTDNQALQNERLFLYYLQNGRDMYTGEALDIDNLSQYDIDHIVPQAFIKDDSIDNRVLVSSAKNRGKSDNVPSIDIVKARKAFWKKLLDAKLMSQRKYDNLTKAERGGLTSDDKARFIQRQLVETRQITKHVARILDERFNNELDSKGRRIRKVKIVTLKSNLVSNFRKEFGFYKIREVNDYHHAHDAYLNAVVAKAILTKYPQLEPEFVYGDYPKYNSYKTRKSATEKLFFYSNIMNFFKTKVTLADGTVVVKDDIEVNNDTGEIVWDKKKHFATVRKVLSYPQVNIVKKTEIQTGGFSKESILAHGNSDKLIPRKTKDIYLDPKKYGGFDSPIVAYSVLVVADIKKGKAQKLKTVTELLGITIMERFRFEKNPSAFLESKGYLNIRDDKLMILPKYSLFELENGRRRLLASAGELQKGNELALPTQYMKFLYLASRYNELKGKPEEIEQKQEFVVQHVSYFDDILQIINDFSNRVILADANLEKINKLYQDNKENISVDELANNIINLFTFTSLGAPAAFKFFDKIVDRKRYTSTKEVLNSTLIHQSITGLYETRIDLGKLGED

SEQ ID NO: 649 - protein, 1370 aa, Streptococcus agalactiae
MNKPYSIGLDIGTNSVGYSVVTDDYKVPAKKMRVLGNTDKEYIKKNLIGALLFDGGNTASDRRLKRTARRRYTRRRNRILYLQEIFAEEMSKVDDSFFHRLEDSFLVEDDKRGSKYPIFATMQEEKDYHEKFPTIYHLRKELADKKEKANLRLVYLALAHIIKFRGHFLIEDDSFDVRNTDIQRQYQAFLEIFDTTFENNHLLSQNIDVEGILTDKISKSAKKDRILAQYPNQKSTGIFAEFLKLIVGNQADFKKHFNLEDKTPLQFAKDSYDEDLENLLGQIGDEFADLFSVAKKLYDSVLLSGILTVTDLSTKAPLSASMIQRYDEHREDLKQLKQFVKASLPEKYQEIFTDSSKDGYAGYIEGKTNQGAFYKYLSKLLTKQEGSEYFLEKIKNEDFLRKQRTFDNGSIPHQVHLTELKAIIRRQSEYYPFLKENLDRIEKILTFRIPYYVGPLAREKSDFAWMTRKTDDSIRPWNFEELVDKEASAEAFIHRMTNNDLYLPEEKVLPKHSLIYEKFTVYNELTKVRYKNEQGETYFFDSNIKQEIFDGVFKEHRKVSKKKLLDFLAKEYEEFRIVDVIGLDKENKAFNASLGTYHDLKKILDKDFLDNPDNESILEDIVQTLTLFEDREMIKKRLENYKDLFTESQLKKLYRRHYTGWGRLSAKLINGIRDKESQKTILDYLISDGRANRNFMQLIHDDGLSFKPIIDKAQAGSHSDNLKEVVGELAGSPAIKKGILQSLKIVDELVKVMGYEPEQVVVEMARENQTTNQGRRNTRQRYKLLEEGVKNLASDLNGNILKEYPTDNQALQNERLFLYYLQNGRDMYTGEALDIDNLSQYDIDHIVPQAFIKDDSIDNRVLVSSAKNRGKSDNVPSIDIVKARKAFWKKLLDAKLMSQRKYDNLTKAERGGLTSDDKARFIQRQLVETRQITKHVARILDERFNNELDSKGRRIRKVKIVTLKSNLVSNFRKEFGFYKIREVNDYHHAHDAYLNAVVAKAILTKYPQLEPEFVYGDYPKYNSYKTRKSATEKLFFYSNIMNFFKTKVTLADGTVVVKDDIEVNNDTGEIVWDKKKHFATVRKVLSYPQVNIVKKTEIQTGGFSKESILAHGNSDKLIPRKTKDIYLDPKKYGGFDSPIVAYSVLVVADIKKGKAQKLKTVTELLGITIMERFRFEKNPSAFLESKGYLNIRDDKLMILPKYSLFELENGRRRLLASAGELQKGNELALPTQYMKFLYLASRYNELKGKPEEIEQKQEFVVQHVSYFDDILQIINDFSNRVILADANLEKINKLYQDNKENISVDELANNIINLFTFTSLGAPAAFKFFDKIVDRKRYTSTKEVLNSTLIHQSITGLYETRIDLGKLGED

SEQ ID NO: 650 - protein, 1370 aa, Streptococcus agalactiae
  misc_feature (9)..(9): Xaa can be any naturally occurring amino acid
MNKPYSIGXDIGTNSVGWSIITDDYKVPAKKMRVLGNTDKEYIKKNLIGALLFDGGNTAADRRLKRTARRRYTRRRNRILYLQEIFAEEMSKVDDSFFHRLEDSFLVEEDKRGSKYPIFATLQEEKDYHEKFSTIYHLRKELADKKEKADLRLIYIALAHIIKFRGHFLIEDDSFDVRNTDISKQYQDFLEIFNTTFENNDLLSQNVDVEAILTDKISKSAKKDRILAQYPNQKSTGIFAEFLKLIVGNQADFKKYFNLEDKTPLQFAKDSYDEDLENLLGQIGDEFADLFSAAKKLYDSVLLSGILTVIDLSTKAPLSASMIQRYDEHREDLKQLKQFVKASLPEKYQEIFADSSKDGYAGYIEGKTNQEAFYKYLSKLLTKQEDSENFLEKIKNEDFLRKQRTFDNGSIPHQVHLTELKAIIRRQSEYYPFLKENQDRIEKILTFRIPYYIGPLAREKSDFAWMTRKTDDSIRPWNFEDLVDKEKSAEAFIHRMTNNDFYLPEEKVLPKHSLIYEKFTVYNELTKVRYKNEQGETYFFDSNIKQEIFDGVFKEHRKVSKKKLLDFLAKEYEEFRIVDVIGLDKENKAFNASLGTYHDLEKILDKDFLDNPDNESILEDIVQTLTLFEDREMIKKRLENYKDLFTESQLKKLYRRHYTGWGRLSAKLINGIRDKESQKTILDYLIDDGRSNRNFMQLINDDGLSFKSIISKAQAGSHSDNLKEVVGELAGSPAIKKGILQSLKIVDELVKVMGYEPEQIVVEMARENQTTNQGRRNSRQRYKLLDDGVKNLASDLNGNILKEYPTDNQALQNERLFLYYLQNGRDMYTGEALDIDNLSQYDIDHIIPQAFIKDDSIDNRVLVSSAKNRGKSDDVPSLEIVKDCKVFWKKLLDAKLMSQRKYDNLTKAERGGLTSDDKARFIQRQLVETRQITKHVARILDERFNNELDSKGRRIRKVKIVTLKSNLVSNFRKEFGFYKIREVNNYHHAHDAYLNAVVAKAILTKYPQLEPEFVYGDYPKYNSYKTRKSATEKLFFYSNIMNFFKTKVTLADGTVVVKDDIEVNNDTGEIVWDKKKHFATVRKVLSYPQNNIVKKTEIQTGGFSKESILAHGNSDKLIPRKTKDIYLDPKKYGGFDSPIVAYSVLVVADIKKGKAQKLKTVTELLGITIMERSRFEKNPSAFLESKGYLNIRADKLIILPKYSLFELENGRRRLLASAGELQKGNELALPTQFMKFLYLASRYNESKGKPEEIEKKQEFVNQHVSYFDDILQLINDFSKRVILADANLEKINKLYQDNKENISVDELANNIINLFTFTSLGAPAAFKFFDKIVDRKRYTSTKEVLNSTLIHQSITGLYETRIDLGKLGED

SEQ ID NO: 651 - protein, 1125 aa, Streptococcus anginosus
MNGLVLGLDIGIASVGVGILNKETGEIIHANSRIFPAATADSNVERRGFRQGRRLGRRKKHRSARLNNLFEEFGFITDFSAIPLNLNPYALRVKGLSEELTNEELFIALKNIIKRRGISYLDDASEDGETASNEYGKAVEENRKLLADKTPGQIQLERFEKYGQVRGDFTVVENGENHRLINVFSTSAYKKEAERILRRQQEFNVRISDEFIEAYLTILTGKRKYYHGPGNEKSRTDYGRFRTDGTTLDNIFGILIGKCTFYPDEYRAAKASYTAQEFNLLNDLNNLTVPTETKKLSPEQKRQIVEYARTAKTLGTPTLLKYIAKLVDGSIDDIKGYRIDKSDKPEMHTFDAYRKMRTLDLVNIDALSRETLDDLAHILTLNTESEGILEALNSKMPSTFTKEQIDELIQFRKKNSAVFGKGWHNFSLKLMNELISELYETSEEQMTILTRLGKQRSREISKRTKYIDEKELTEEIYNPVVAKSVRQAIKIINEATKRYGIFDNIVIEMARENNEEDAKKDYIKRQKANQDEKNASMEKAAFQYNGKKELPDSIFHGHKELATKIRLWHQQGERCLYTGKNISIRDLIHNPHQYEIDHILPLSLSFDDGLANKVLVLATANQEKGQRTPFQAIDSMDDAWSYREFKQYVRNSKSLSNKKKDYLLTEEDISKIEVKQKFIERNLVDTRYSSRVVLNTLQEFYKTNDFDTKISVVRGQFTSQLRRKWKIEKSRDTYHHHAVDALIIAASSQLRLWKKQNNPLISYKEGQFVDPETGEILSLTDDEYKELVFRPPYDYFVDTLKSKSFEDSILFSYQVDSKYNRKISDATIYGTRKAQLGKDKQEETYVLGKIKDIYSQKGYEDFIKRYNKDETQFLIYHKDPQTFEKVIEEILKTYPDKELNEKGKEIPCNPFEKYRQENGPIRKYSKKGKGPEIKSLKYYDNKLGNHIDITPVNSQNQVVLQSLKPWRTDVYFNPRTSKYELMGLKYSDLRFEKGSGSYGISPEKYNKVKAKEGVNEDSEFKFTLYKNDLILIKDTETGEQQLFRYGSRNDTSKHYVELKPYEKAKFEGNQQLMNLLGTVAKGGQCLKGINKPNLSIYKVKTDVLGNKYFIKKEGDQPQLNFKKKF

SEQ ID NO: 652 - protein, 1386 aa, Streptococcus anginosus
MNQKYSIGLDIGTNSVGWAVITDDYKVPAKKMKVLGNTDKQSIKKNLLGALLFDSGETAEATRLKRTARRRYTRRRNRLRYLQEIFAEEMMQVDESFFQRLDDSFLVDEDKRGERHPIFGNIAAEVKYHDEFPTIYHLRKHLADISQKADLRLVYLALAHMIKFRGHFLIEGQLKAENTNVQALFKDFVEVYDKTVEESHLSEITVDALSILTEKVSKSRRLENLIAHYPAEKKNTLFGNLIALFLGLQPNFKTNFQLSEDAKLQFSKDTYEEDLEGLLGEVGDEYADLFASAKNLYDAILLSGILTVDDNSTKAPLSASMVKRYEEHQKDLKKFEDFIKVNALDQYNAIFKDKNKKGYAGYIESGVKQDEFYKYLKGILLQINGSGDFLDKIDREDFLRKQRTFDNGSIPHQIHLQEMHAILRRQGEHYPFLKENQDKIEKILTFRIPYYVGPLARKGSRFAWAEYKADEKITPWNFDDILDKEKSAEKFITRMTLNDLYLPEEKVLPKHSLLYETFTVYNELTKVKYVNEQGEAKFFDANMKQEIFDHVFKENRKVTKDKLLNYLNKEFEEFRIVNLTGLDKENKVFNSSLGTYHDLRKILNKSFLDNKENAQIIEDIIQTLTLFEDREMIRQRLQKYSDIFTKAQLKKLERRHYTGWGRLSYKLINGIRNKENKKTILDYLIDDGYANRNFMQLINDDALSFKEEIAKAQIIGDVDDIANVVHDLPGSPAIKKGILQSVKIVDELVKVMGHNPANIIIEMARENQTTDRGRRNSQQRLKLLQDSLKNLDNPVNIKNVENQQLQNDRLFLYYIQNGKDMYTGETLDINNLSQYDIDHIIPQAYIKDDSFDNRVLTSSSENRGKSDNVPSIEVVCARKADWMRLRKAGLISQRKFDNLTKAERGGLTENDKAGFIKRQLVETRQITKHVAQVLDARFNAKHDENKKVIRDVKIITLKSNLVSQFRKDFKFYKVREINDYHHAHDAYLNAVIGTALLKKYPKLASEFVYGEFKKYDVRKFIAKSDKEIGKATAKYFFYSNLMNFFKKEVKFADGTVVERPDIETSEDGEIAWNKQTDFKIVRKVLSYPQVNIVKKTEVQTHGLDRGKPRGLFNANPSPKPKPDSSENLVGVKRNLDPKKYGGYAGISNSYAVLVKAIIEKGVKKKETMVLEFQGISILDRITFEKDKRAFLLGKGYKDIKKIIELPKYSLFELKDGSRRMLASILSTNNKRGEIHKGNELFVPQKFTTLLYHAKRINNPINKDHIEYVKKHRDDFKELLNYVLEFNEKYVGATKNGERLKEAVADFDSKSNEEICTSFLGAVNSKNAGLFELTSLGSASDFEFLGVKIPRYRDYTPSSLLKDSTLIHQSITGLYETRIDLSKLGED

SEQ ID NO: 653 - protein, 1396 aa, Streptococcus anginosus
MTKPYSIGLDIGTNSVGWAVITDDYKVPAKKMKVLGNTNRDYIKKNLLGALLFDGGETAEGRRLKRTARRRYTRRKNRLRYLQEIFAEEMMQVDESFFQRLDDSFLVEEDKQGSKYPIFGTLKEEKEYHKKFKTIYHLREELANSKEKADLRLVYLALAHMIKFRGHFLYEGDLKAENTDVQALFKDFVEEYDKTIEESHLSEITVDALSILTEKVSKSSRLENLIAHYPTEKKNTLFGNLIALSLGLQANFKTNFQLSEDAKLQFSKDTYEEDLEGLLGEVGDEYADLFVSAKNLYDAILLSGILTVDDNSTKAPLSASMVKRYKEHKEELAAFKRFIKEKLPKKYEEIFKDDTKNGYAGYVGADKKLRKRSGKLATEEEFYKYVKGILNKVEGADYFLDKIDREDFLRKQRTFDNGSIPHQIHLQEMHAILRRQGEHYPFLKENQDKIEKILTFRIPYYVGPLARKGSRFAWAEYKADEKITPWNFDDILDKEKSAEKFITRMTLNDLYLPEEKVLPKHSPLYETFTVYNELTKVKYVNEQGEAKFFDTNMKQEIFDHVFKENRKVTKDKLLNYLNKEFEEFRIVNLTGLDKENKAFNASLGTYHDLRKILDKSFLDDKVNEKIIEDIIQTLTLFEDREMIRQRLQKYSDIFTTQQLKELERRHYTGWGRLSYKLINGIRNKENKKTILDYLIDDGYANRNFMQLINDDALSFKEEIARAQIIGDVDDIANVVHDLPGSPAIKKGILQSVKIVDELVKVMGHNPTNIIIEMARENQTTDKGRRNSQQRLKLLQDSLKNLDNPVNIKNVENQQLQNDRLFLYYIQNGKDMYTGETLDINNLSQYDIDHIIPQAFIKDNSLDNRVLTRSDKNRGKSDDVPSIEVVHEMKSFWSKLLSVKLITQRKFDNLTKAERGGLTENDKAGFIKRQLVETRQITKHVAQVLDARFNAKHDENKKVIRDVKIITLKSNLVSQFRKDFKFYKVREINDYHHAHDAYLNAVIGTALLKKYPKLASEFVYGEFKKYDVRKFIAKSDKEIGKATAKYFFYSNLMNFFKKEVKFADGTVVERPDIETSEDGEIAWNKQTDFKIVRKVLSYPQVNIVKKTEVQTHGLDRGKPRGLFNANPSPKPKPDSSENLVGIKRNLDPKKYGGYAGISNSYAVLVKAIIEKGVKKKETMVLEFQGISILDRITFEKDKRAFLLGKGYKDIKKIIELPKYSLFELKDGSRRMLASILSTNNKRGEIHKGNELFVPQKFTTLLYHAKRINNPINKDHIEYVKKHRDDFKELLNYVLEFNEKYVGATKNGERLKEAVADFDSKSNEEICTSFLGAVNSKNAGLFELTSLGSASDFEFLGVKIPRYRDYTPSSLLKDSILIHQSITGLYETRIDLSKLGED

SEQ ID NO: 654 - protein, 1375 aa, Streptococcus canis
MEKKYSIGLDIGTNSVGWAVITDDYKVPSKKFKVLGNTNRKSIKKNLMGALLFDSGETAEATRLKRTARRRYTRRKNRIRYLQEIFANEMAKLDDSFFQRLEESFLVEEDKKNERHPIFGNLADEVAYHRNYPTIYHLRKKLADSPEKADLRLIYLALAHIIKFRGHFLIEGKLNAENSDVAKLFYQLIQTYNQLFEESPLDEIEVDAKGILSARLSKSKRLEKLIAVFPNEKKNGLFGNIIALALGLTPNFKSNFDLTEDAKLQLSKDTYDDDLDELLGQIGDQYADLFSAAKNLSDAILLSDILRSNSEVTKAPLSASMVKRYDEHHQDLALLKTLVRQQFPEKYAEIFKDDTKNGYAGYVGIGIKHRKRTTKLATQEEFYKFIKPILEKMDGAEELLAKLNRDDLLRKQRTFDNGSIPHQIHLKELHAILRRQEEFYPFLKENREKIEKILTFRIPYYVGPLARGNSRFAWLTRKSEEAITPWNFEEVVDKGASAQSFIERMTNFDEQLPNKKVLPKHSLLYEYFTVYNELTKVKYVTERMRKPEFLSGEQKKAIVDLLFKTNRKVTVKQLKEDYFKKIECFDSVEIIGVEDRFNASLGTYHDLLKIIKDKDFLDNEENEDILEDIVLTLTLFEDREMIEERLKTYAHLFDDKVMKQLKRRHYTGWGRLSRKMINGIRDKQSGKTILDFLKSDGFSNRNFMQLIHDDSLTFKEEIEKAQVSGQGDSLHEQIADLAGSPAIKKGILQTVKIVDELVKVMGHKPENIVIEMARENQTTTKGLQQSRERKKRIEEGIKELESQILKENPVENTQLQNEKLYLYYLQNGRDMYVDQELDINRLSDYDVDHIVPQSFIKDDSIDNKVLTRSVENRGKSDNVPSEEVVKKMKNYWRQLLNAKLITQRKFDNLTKAERGGLSEADKAGFIKRQLVETRQITKHVARILDSRMNTKRDKNDKPIREVKVITLKSKLVSDFRKDFQLYKVRDINNYHHAHDAYLNAVVGTALIKKYPKLESEFVYGDYKVYDVRKMIAKSEQEIGKATAKRFFYSNIMNFFKTEVKLANGEIRKRPLIETNGETGEVVWNKEKDFATVRKVLAMPQVNIVKKTEVQTGGFSKESILSKRESAKLIPRKKGWDTRKYGGFGSPTVAYSILVVAKVEKGKAKKLKSVKVLVGITIMEKGSYEKDPIGFLEAKGYKDIKKELIFKLPKYSLFELENGRRRMLASATELQKANELVLPQHLVRLLYYTQNISATTGSNNLGYIEQHREEFKEIFEKIIDFSEKYILKNKVNSNLKSSFDEQFAVSDSILLSNSFVSLLKYTSFGASGGFTFLDLDVKQGRLRYQTVTEVLDATLIYQSITGLYETRTDLSQLGGD

SEQ ID NO: 655 - protein, 1345 aa, Streptococcus constellatus
MGKPYSIGLDIGTNSVGWAVVTDDYKVPAKKMKVLGNTDKQSIKKNLLGALLFDSGETAEATRLKRTARRRYTRRKNRLRYLQEIFTGEMNKVDENFFQRLDDSFLVDEDKRGEHHPIFGNIAAEVKYHDDFPTIYHLRRHLADTSKKADLRLVYLALAHMIKFRGHFLYEGDLKAENTDVQALFKDFVEEYDKTIEESHLSEITVDALSILTEKVSKSSRLENLIAHYPTEKKNTLFGNLIALSLDLHPNFKTNFQLSEDAKLQFSKDTYEEDLEGFLGEVGDEYADLFASAKNLYDAILLSGILTVDDNSTKAPLSASMVKRYEEHQKDLKKLKDFIKVNAPDQYNAIFKDKNKKGYASYIESGVKQDEFYKYLKGILLKINGSGDFLDKIDREDFLRKQRTFDNGSIPHQIHLQEMHAILRRQGEHYPFLKENQDKIEKILTFRIPYYVGPLARKGSRFAWAEYKADEKITPWNFDDILDKEKSAEKFITRMTLNDLYLPEEKVLPKHSPLYEAFTVYNELTKVKYVNEQGEAKFFDTNMKQEIFDHVFKENRKVTKDKLLNYLNKEFEEFRIVNLTGLDKENKAFNSSLGTYHDLRKILDKSFLDDKANEKTIEDIIQTLTLFEDREMIRQRLQKYSDIFTKAQLKKLERRHYTGWGRLSYKLINGIRNKENKKTILDYLIDDGYANRNFMQLINDDALSFKEEIARAQIIDDVDDIANVVHDLPGSPAIKKGILQSVKIVDELVKVMGHNPANIIIEMARENQTTDKGRRNSQQRLKLLQDSLKNLDNPVNIKNVENQQLQNDRLFLYYIQNGKDMYTGETLDINNLSQYDIDHIIPQAFIKDNSLDNRVLTRSDKNRGKSDDVPSIEVVHEMKSFWSKLLSVKLITQRKFDNLTKAERGGLTEEDKAGFIKRQLVETRQITKHVAQILDERFNTEFDGNKRRIRNVKIITLKSNLVSNFRKEFELYKVREINDYHHAHDAYLNAVVGNALLLKYPQLEPEFVYGEYPKYNSYRSRKSATEKFLFYSNILRFFKKEDIQTNEDGEIAWNKEKHIKILRKVLSYPQVNIVKKTEEQTGGFSKESILPKGESDKLIPRKTKNSYWDPKKYGGFDSPVVAYSILVFADVEKGKSKKLRKVQDMVGITIMEKKRFEKNPVDFLEQRGYRNVRLEKIIKLPKYSLFELENKRRRLLASAKELQKGNELVIPQRFTTLLYHSYRIEKDYEPEHREYVEKHKDEFKELLEYISVFSRKYVLADNNLTKIEMLFSKNKDAEVSSLAKSFISLLTFTAFGAPAAFNFFGENIDRKRYTSVTECLNATLIHQSITGLYETRIDLSKLGED

SEQ ID NO: 656 - protein, 538 aa, Streptococcus dysgalactiae
DYDVDHIVPQSFIKDDSIDNKVLTRSDKNRGKSDNVPSEEVVKKMKNYWRQLLNAKLITQRKFDNLTKAERGGLSELDKAGFIKRQLVETRQITKHVAQILDSRMNTKYDENDKLIREVKVITLKSKLVSDFRKDFQFYKVREINNYHHAHDAYLNAVVGTALIKKYPKLESEFVYGDYKVYDVRKMIAKSEQEIGKATAKRFFYSNIMNFFKTEITLANGEIRKRPLIETNEETGEIVWDKGRDFATVRKVLSMPQVNIVKKTEVQTGALTNESIYARGSFDKLISRKHRFESSKYGGFGSPTVTYSVLVVAKSKVQDGKVKKIKTGKELIGITLLDKLVFEKNPLKFIEDKGYGNVQIDKCIRLPKYSLFEFENGTRRMLASVMANNNSRGDLQKANEMFLPAKLVTLLYHAHKIESSKELEHEAYILDHYNDLYQLLSYIERFASLYVDVEKNISKVKELFSNIESYSISEICSSVINLLTLTASGAPADFKFLGTTIPRKRYGSPQSILSSTLIHQSITGLYETRIDLSQLGGD

SEQ ID NO: 657 - protein, 1155 aa, Streptococcus dysgalactiae
MDKKYSIGLDIGTNSVGWAVITDDYKVPSKKFKVLGNTDRHSIKKNLIGALLFDSGETAEATRLKRSARRRYTRRKNRIRYLQEIFSSEMSKVDDSFFHRLEESFLVEEDKKHERHPIFGNIVDEVAYHEKYPTIYHLRKKLADSTDKADLRLIYLALAHMIKFRGHFLIEGDLNPDNSDMDKLFIQLVQTYNQLFEENPINASRVDAKAILSARLSKSRRLENLIAQLPGEKRNGLFGNLIALSLGLTPNFKSNFDLAEDAKLQLSKDTYDDDLDNLLAQIGDQYADLFLAAKNLSDAILLSDILRVNSEITKAPLSASMIKRYDEHHQDLTLLKALVRQQLPEKYKEIFFDQSKNGYAGYIDGGASQEEFYKFIKPILEKMDGTEELLAKLNREDLLRKQRTFDNGSIPHQIHLGELHAILRRQEDFYPFLKDNREKIEKILTFRIPYYVGPLARGNSRFAWMTRKSEETITPWNFEEVVDKGASAQSFIERMTNFDKNLPNEKVLPKHSLLYEYFTVYNELTKVKYVTEGMRKPEFLSGKQKEAIVDLLFKTNRKVTVKQLKEDYFKKIECFDSVEISGVEDRFNASLGTYHDLLKIIKDKDFLDNEENEDILEDIVLTLTLFEDKEMIEERLKTYAHLFDDKVMKQLKRRHYTGWGRLSRKLINGIRDKQSGKTILDFLKSDGFANRNFIQLIHDDSLTFKEAIQKAQVSGQGHSLHEQIANLAGSPAIKKGILQSVKVVDELVKVMGHKPENIVIEMARENQTTQKGQKNSRERMKRIEEGIKELGSQILKEHPVENTQLQNEKLYLYYLQNRRDMYVDQELDINRLSDYDVDHIVPQSFIKDDSIDNKVLTRSDKNRGKSDDVPSEEVVKKMKNYWRQLLNAKLITQRKFDNLTKAERGGLSELDKAGFIKRQLVETRQITKHVAQILDSRMNTKYDENDKLIREVKVITLKSKLVSDFRKDFQFYKVREINNYHHAHDAYLNAVVGTALIKKYPKLESEFVYGDYKVYDVRKMIAKSEQEIGKATAKRFFYSNIMNFFKTEITLANGEIRKRPLIETNEETGEIVWDKGRDFATVRKVLSMPQVNIVKKTEVQTGALTNESIYARGSFDKLISRKHRFESSKYGGFGSPTVTYSVLVVAKYQSYKMEK

SEQ ID NO: 658 - protein, 1371 aa, Streptococcus dysgalactiae
MDKKYSIGLDIGTNSVGWAVITDDYKVPSKKFKVLGNTDRHSIKKNLIGALLFDSGETAEATRLKRTARRRYTRRKNRIRYLQEIFSSEMSKVDDSFFHRLEESFLVEEDKKHERHPIFGNIVDEVAYHEKYPTIYHLRKKLADSTDKADLRLIYLALAHMIKFRGHFLIEGDLNPDNSDMDKLFIQLVQTYNQLFEENPINASRVDAKAILSARLSKSRRLENLIAQLPGEKRNGLFGNLIALSLGLTPNFKSNFDLAEDAKLQLSKDTYDDDLDNLLAQIGDQYADLFLAAKNLSDAILLSDILRVNSEITKAPLSASMIKRYDEHHQDLTLLKALVRQQLPEKYKEIFFDQSKNGYAGYIDGGASQEEFYKFIKPILEKMDGTEELLAKLNREDLLRKQRTFDNGSIPHQIHLGELHAILRRQEDFYPFLKDNREKIEKILTFRIPYYVGPLARGNSRFAWMTRKSEETITPWNFEEVVDKGASAQSFIERMTNFDKNLPNEKVLPKHSLLYEYFTVYNELTKVKYVTEGMRKPEFLSGKQKEAIVDLLFKTNRKVTVKQLKEDYFKKIECFDSVEISGVEDRFNASLGTYHDLLKIIKDKDFLDNEENEDILEDIVLTLTLFEDKEMIEERLKTYAHLFDDKVMKQLKRRHYTGWGRLSRKLINGIRDKQSGKTILDFLKSDGFANRNFIQLIHDDSLTFKEAIQKAQVSGQGHSLHEQIANLAGSPAIKKGILQSVKVVDELVKVMGHKPENIVIEMARENQTTQKGQKNSRERMKRIEEGIKELGSQILKEHPVENTQLQNEKLYLYYLQNGRDMYVDQELDINRLSDYDVDHIVPQSFIKDDSIDNKVLTRSDKNRGKSDDVPSEEVVKKMKNYWRQLLNAKLITQRKFDNLTKAERGGLSELDKAGFIKRQLVETRQITKHVAQILDSRMNTKYDENDKLIREVKVITLKSKLVSDFRKDFQFYKVREINNYHHAHDAYLNAVVGTALIKKYPKLESEFVYGDYKVYDVRKMIAKSEQEIGKATAKRFFYSNIMNFFKTEITLANGEIRKRPLIETNEETGEIVWNKGRDFATVRKVLSMPQVNIVKKTEVQTGALTNESIYARGSFDKLISRKHRFESSKYGGFGSPTVTYSVLVVAKSKVQDGKVKKIKTGKELIGITLLDKLVFEKNPLKFIEDKGYGNVQIDKCIKLPKYSLFEFENGTRRMLASVMANNNSRGDLQKANEMFLPAKLVTLLYHAHKIESSKELEHEAYILDHYNDLYQLLSYIERFASLYVDVEKNISKVKELFSNIESYSISEICSSVINLLTLTASGAPADFKFLGTTIPRKRYGSPQSILSSTLIHQSITGLYETRIDLSQLGGD

SEQ ID NO: 659 - protein, 1371 aa, Streptococcus dysgalactiae
MDKKYSIGLDIGTNSVGWAVITDDYKVPSKKFKVLGNTDRHSIKKNLIGALLFDSGETAEATRLKRTARRRYTRRKNRIRYLQEIFSSEMSKVDDSFFHRLEESFLVEEDKKHERHPIFGNIVDEVAYHEKYPTIYHLRKKLADSTDKADLRLIYLALAHMIKFRGHFLIEGDLNPDNSDMDKLFIQLVQTYNQLFEENPINASRVDAKAILSARLSKSRRLENLIAQLPGEKRNGLFGNLIALSLGLTPNFKSNFDLAEDAKLQLSKDTYDDDLDNLLAQIGDQYADLFLAAKNLSDAILLSDILRVNSEITKAPLSASMIKRYDEHHQDLTLLKALVRQQLPEKYKEIFFDQSKNGYAGYIDGGASQEEFYKFIKPILEKMDGTEELLAKLNREDLLRKQRTFDNGSIPHQIHLGELHAILRRQEDFYPFLKDNREKIEKILTFRIPYYVGPLARGNSRFAWMTRKSEETITPWNFEEVVDKGASAQSFIERMTNFDKNLPNEKVLPKHSLLYEYFTVYNELTKVKYVTEGMRKPEFLSGKQKEAIVDLLFKTNRKVTVKQLKEDYFKKIECFDSVEISGVEDRFNASLGTYHDLLKIIKDKDFLDNEENEDILEDIVLTLTLFEDKEMIEERLKKYANLFDDKVMKQLKRRHYTGWGRLSRKLINGIRDKQSGKTILDFLKSDGFANRNFMQLINDDSLTFKEAIQKAQVSGQGHSLHEQIANLAGSPAIKKGILQSVKVVDELVKVMGHKPENIVIEMARENQTTQKGQKNSRERMKRIEEGIKELGSQILKEHPVENTQLQNEKLYLYYLQNGRDMYVDQELDINRLSDYDVDHIVPQSFIKDDSIDNKVLTRSDKNRGKSDNVPSEEVVKKMKNYWRQLLNAKLITQRKFDNLTKAERGGLSELDKAGFIKRQLVETRQITKHVAQILDSRMNTKYDENDKLIREVKVITLKSKLVSDFRKDFQFYKVREINNYHHAHDAYLNAVVGTALIKKYPKLESEFVYGDYKVYDVRKMIAKSEQEIGKATAKRFFYSNIMNFFKTEITLANGEIRKRPLIETNEETGEIVWDKGRDFATVRKVLSMPQVNIVKKTEVQTGALTNESIYARGSFDKLISRKHRFESSKYGGFGSPTVTYSVLVVAKSKVQDGKVKKIKTGKELIGITLLDKLVFEKNPLKFIEDKGYGNVQIDKCIKLPKYSLFEFENGTRRMLASVMANNNSRGDLQKANEMFLPAKLVTLLYHAHKIESSKELEHEAYILDHYNDLYQLLSYIERFASLYVDVEKNISKVKELFSNIESYSISEICSSVINLLTLTASGAPADFKFLGTTIPRKRYGSPQSILSSTLIHQSITGLYETRIDLSQLGGD

SEQ ID NO: 660 - protein, 1371 aa, Streptococcus dysgalactiae
MDKKYSIGLDIGTNSVGWAVITDDYKVPSKKFKVLGNTDRHSIKKNLIGALLFDSGETAEATRLKRTARRRYTRRKNRIRYLQEIFSSEMSKVDDSFFHRLEESFLVEEDKKHERHPIFGNIVDEVAYHEKYPTIYHLRKKLADSTDKADLRLIYLALAHMIKFRGHFLIEGDLNPDNSDVDKLFIQLVQTYNQLFEEKPINASGVDAKAILSARLSKSKRLENLIAQLPGEKKNGLFGNLIALSLGLTPNFKSNFDLAEDAKLQLSKDTYDDDLDNLLAQIGNQYADLFLAAKNLSDAILLSDILRVNSEITKAPLSASMIKRYDEHHQDLTLLKALVRQQLPEKYKEIFFDQSKNGYAGYIDGGASQEEFYKFIKPILEKMDGTEELLAKLNREDLLRKQRTFDNGSIPHQIHLGELHAILRRQEDFYPFLKDNREKIEKILTFRIPYYVGPLARGNSRFAWMTRKSEETITPWNFEEVVDKGASAQSFIERMTNFDKNLPNEKVLPKHSLLYEYFTVYNELTKVKYVTEGMRKPEFLSGKQKEAIVDLLFKTNRKVTVKQLKEDYFKKIECFDSVEISGVEDRFNASLGTYHDLLKIIKDKDFLDNEENEDILEDIVLTLTLFEDKEMIEERLKKYANLFDDKVMKQLKRRHYTGWGRLSRKLINGIRDKQSGKTILDFLKSDGFANRNFMQLINDDSLTFKEAIQKAQVSGQGHSLHEQIANLAGSPAIKKGILQSVKVVDELVKVMGHKPENIVIEMARENQTTQKGQKNSRERMKRIEEGIKELGSQILKEHPVENTQLQNEKLYLYYLQNGRDMYVDQELDINRLSDYDVDHIVPQSFIKDDSIDNKVLTRSDKNRGKSDNVPSEEVVKKMKNYWRQLLNAKLITQRKFDNLTKAERGGLSELDKAGFIKRQLVETRQITKHVAQILDSRMNTKYDENDKLIREVKVITLKSKLVSDFRKDFQFYKVREINNYHHAHDAYLNAVVGTALIKKYPKLESEFVYGDYKVYDVRKMIAKSEQEIGKATAKRFFYSNIMNFFKTEITLANGEIRKRPLIETNEETGEIVWDKGRDFATVRKVLSMPQVNIVKKTEVQTGALTNESIYARGSFDKLISRKHRFESSKYGGFGSPTVTYSVLVVAKSKVQDGKVKKIKTGKELIGITLLDKLVFEKNPLKFIEDKGYGNVQIDKCIKLPKYSLFEFENGTRRMLASVMANNNSRGDLQKANEMFLPAKLVTLLYHAHKIESSKELEHEAYILDHYNDLYQLLSYIERFASLYVDVEKNISKVKELFSNIESYSISEICSSVINLLTLTASGAPADFKFLGTTIPRKRYGSPQSILSSTLIHQSITGLYETRIDLSQLGGD

SEQ ID NO: 661 - protein, 1370 aa, Streptococcus gallolyticus; identical to SEQ ID NO: 209

SEQ ID NO: 662 - protein, 1375 aa, Streptococcus infantarius
MEKSYSIGLDIGTNSVGWAVITDDYKVPAKKMKVLGNTDKKYIKKNLLGALLFDSGETAEVTRLKRTARRRYTRRKNRLRYLQEIFAKEMTKVDESFFQRLEESFLTDDDKTFDSHPIFGNKAEEDAYHQKFPTIYHLRKYLADSQEKADLRLVYLALAHMIKYRGHFLIEGELNAENTDVQKLFNVFVETYDKIVDESHLSEIEVDASSILTEKVSKSRRLENLIKQYPTEKKNTLFGNLIALALGLQPNFKTNFKLSEDAKLQFSKDTYEEDLEELLGKVGDDYADLFISAKNLYDAILLSGILTVDDNSTKAPLSASMIKRYVEHHEDLEKLKEFIKINKLKLYHDIFKDKTKNGYAGYIDNGVKQDEFYKYLKTILTKIDDSDYFLDKIERDDFLRKQRTFDNGSIPHQIHLQEMHSILRRQGDYYPFLKENQAKIEKILTFRIPYYVGPLARKDSRFAWANYHSDEPITPWNFDEVVDKEKSAEKFITRMTLNDLYLPEEKVLPKHSHVYETFTVYNELTKIKYVNEQGESFFFDANMKQEIFDHVFKENRKVTKAKLLSYLNNEFEEFRINDLIGLDKDSKSFNASLGTYHDLKKILDKSFLDDKTNGQIIEDIVLTLTLFEDRDMIHERLQKYSDFFTSQQLKKLERRHYTGWGRLSYKLINGIRNKENNKTILDFLIDDGHANRNFMQLINDESLSFKTIIQEAQVVGDVDDIEAVVHDLPGSPAIKKGILQSVKIVDELVKVMGDNPDNIVIEMARENQTTGYGRNKSNQRLKRLQDSLKEFGSDILSKKKPSYVDSKVENSHLQNDRLFLYYIQNGKDMYTGEELDIDRLSDYDIDHIIPQAFIKDNSIDNKVLTSSAKNRGKSDDVPSIEIVRNRRSYWYKLYKSGLISKRKFDNLTKAERGGLTEADKAGFIKRQLVETRQITKHVAQILDARFNTKRDENDKVIRDVKVITLKSNLVSQFRKEFKFYKVREINDYHHAHDAYLNAVVGTALLKKYPKLTPEFVYGEYKKYDVRKLIAKSSDDYSEMGKATAKYFFYSNLMNFFKTEVKYADGRVFERPDIETNADGEVVWNKQKDFDIVRKVLSYPQVNIVKKVEAQTGGFSKESILSKGDSDKLIPRKTKKVYWNTKKYGGFDSPTVAYSVLVVADIEKGKAKKLKTVKELVGISIMERSFFEENPVSFLEKKGYHNVQEDKLIKLPKYSLFEFEGGRRRLLASATELQKGNEVMLPAHLVELLYHAHRIDSFNSTEHLKYVSEHKKEFEKVLSCVENFSNLYVDVEKNLSKVRAAAESMTNFSLEEISASFINLLTLTALGAPADFNFLGEKIPRKRYTSTKECLSATLIHQSVTGLYETRIDLSKLGEE

SEQ ID NO: 663 - protein, 1368 aa, Streptococcus iniae
MRKPYSIGLDIGTNSVGWAVITDDYKVPSKKMRIQGTTDRTSIKKNLIGALLFDNGETAEATRLKRTTRRRYTRRKYRIKELQKIFSSEMNELDIAFFPRLSESFLVSDDKEFENHPIFGNLKDEITYHNDYPTIYHLRQTLADSDQKADLRLIYLALAHIIKFRGHFLIEGNLDSENTDVHVLFLNLVNIYNNLFEEDIVETASIDAEKILTSKTSKSRRLENLIAEIPNQKRNMLFGNLVSLALGLTPNFKTNFELLEDAKLQISKDSYEEDLDNLLAQIGDQYADLFIAAKKLSDAILLSDIITVKGASTKAPLSASMVQRYEEHQQDLALLKNLVKKQIPEKYKEIFDNKEKNGYAGYIDGKTSQEEFYKYIKPILLKLDGTEKLISKLEREDFLRKQRTFDNGSIPHQIHLNELKAIIRRQEKFYPFLKENQKKIEKLFTFKIPYYVGPLANGQSSFAWLKRQSNESITPWNFEEVVDQEASARAFIERMTNFDTYLPEEKVLPKHSPLYEMFMVYNELTKVKYQTEGMKRPVFLSSEDKEEIVNLLFKKERKVTVKQLKEEYFSKMKCFHTVTILGVEDRFNASLGTYHDLLKIFKDKAFLDDEANQDILEEIVWTLTLFEDQAMIERRLVKYADVFEKSVLKKLKKRHYTGWGRLSQKLINGIKDKQTGKTILGFLKDDGVANRNFMQLINDSSLDFAKIIKNEQEKTIKNESLEETIANLAGSPAIKKGILQSIKIVDEIVKIMGQNPDNIVIEMARENQSTMQGIKNSRQRLRKLEEVHKNTGSKILKEYNVSNTQLQSDRLYLYLLQDGKDMYTGKELDYDNLSQYDIDHIIPQSFIKDNSIDNTVLTTQASNRGKSDNVPNIETVNKMKSFWYKQLKSGAISQRKFDHLTKAERGALSDFDKAGFIKRQLVETRQITKHVAQILDSRFNSNLTEDSKSNRNVKIITLKSKMVSDFRKDFGFYKLREVNDYHHAQDAYLNAVVGTALLKKYPKLEAEFVYGDYKHYDLAKLMIQPDSSLGKATTRMFFYSNLMNFFKKEIKLADDTIFTRPQIEVNTETGEIVWDKVKDMQTIRKVMSYPQVNIVMKTEVQTGGFSKESIWPKGDSDKLIARKKSWDPKKYGGFDSPIIAYSVLVVAKIAKGKTQKLKTIKELVGIKIMEQDEFEKDPIAFLEKKGYQDIQTSSIIKLPKYSLFELENGRKRLLASAKELQKGNELALPNKYVKFLYLASHYTKFTGKEEDREKKRSYVESHLYYFDEIMQIIVEYSNRYILADSNLIKIQNLYKEKDNFSIEEQAINMLNLFTFTDLGAPSAFKFFNGDIDRKRYSSTNEIINSTLIYQSPTGLYETRIDLSKLGGK

SEQ ID NO: 664 - protein, 1392 aa, Streptococcus mitis
MNNNNYSIGLDIGTNSVGWAVITDDYKVPSKKMKVLGNTDKHFIKKNLIGALLFDEGATAEDRRFKRTARRRYTRRKNRLRYLQEIFSEEMSKVDSSFFHRLDDSFLVPEDKRGSKYPIFATLAEEKEYHKKFPTIYHLRKHLADSKEKTDLRLIYLALAHMIKYRGHFLYEESFDIKNNDIQKIFSEFISIYDNTFEGSSLSGQNAQVEAIFTDKISKSAKRERILKLFAYEKSTDLFSEFLKLIVGNQADFKKHFDLEEKAPLQFSKDTYDEDLENLLGQIGDDFADLFLVAKKLYDAILLSGILTVTDSSTKAPLSASMIERYENHQKDLAALKQFIQNNLQEKYDEVFSDQSKDGYARYINGKTTQEAFYKYIKNLLSKFEGSDYFLDKIEREDFLRKQRTFDNGSIPHQIHLQEMNAIIRRQGEHYPFLKEYKEKIETILTFRIPYYVGPLARGNRNFAWLTRNSDQAIRPWNFEEIVDQASSAEEFINKMTNYDLYLPEEKVLPKHSLLYETFAVYNELTKVKFISEGLRDYQFLDSGQKKQIVNQLFKEKRKVTEKDIIQYLHNVDGYDGIELKGIEKQFNASLSTYHDLLKIIKDKEFMDDPKNEEILENIVHTLTIFEDREMIKQRLAQYASIFDKKVIKALTRRHYTGWGKLSAKLINGICDKKTGKTILDYLIDDGYSNRNFMQLINDDGLSFKDIIQKAQVVGKTNDVKQVVQELPGSPAIKKGILQSIKLVDELVKVMGHAPESIVIEIARENQTTARGKKNSQQRYKRIEDALKNLAPGLDSNILKEHPTDNIQLQNDRLFLYYLQNGKDMYTGEALDINQLSSYDIDHIVPQAFIKDDSLDNRVLTSSKDNRGKSDNVPSLEVVQKRKAFWQQLLDSKLISEHKFNNLTKAERGGLDERDKVGFIRRQLVETRQITKHVAQILDARFNTEVNEKDKKNRTVKIITLKSNLVSNFRKEFKLYKVREINDYHHAHDAYLNAVVAKAILKKYPKLEPGFVYGDYQKYDIKRYISRSKDPKEVEKATEKYFFYSNLLNFFKEEVHYADGTIVKRENIEYSKDTGEIAWNKEKDFATIKKVLSLPQVNIVKKTEIQTHGLDRGKPRGLFNSNPSPKPSEDRKENLVPIKQGLDPRKYGGYAGISNSYAVLVKAIIEKGAKKQQKTVLEFQGISILDKINFEKNKENYLLEKGYIKILSTITLPKYSLFEFPDGTRRRLASILSTNNKRGEIHKGNELVIPEKYTTLLYHAKNINKTLEPEHLEYVEKHRNDFAKLLEYVLNFNDKYVGALKNGERIRQAFIDWETVDIEKLCFSFIGPRNSKNAGLFELTSQGSASDFEFLGVKIPRYRDYTPSSLLNATLIHQSITGLYETRIDLSKLGED

SEQ ID NO: 665 - protein, 1134 aa, Streptococcus mutans
MANGKILGLDIGIASVGVGIIDKETGKIIHVNSRIFPAATADSNVERRGFRQGRRLVRRKKHRKVRLADLFLDSNLLTDFSKVSLNLNPYQLRVKGLNEELSNEELFIALKSIVSRRGISYLDDASEDSGANSSEYGKAVEENRKLLEDRTPGQIQLERFEKYGKVRGDFTVVENGENHRLINVFSTSAYKKEAERILRRQQEFNMRIADEFIEAYLTILTGKRKYYHGPGNEKSRTDYGRFRTDGTTLDNIFGILIGKCTFYPDEYRAAKASYTAQEFNLLNDLNNLTVPTETKKLSEEQKRQIIEHAKTVKTLGAPTLLKYIVKLVGCSADDIKGYRIDKSDKPEIHTFEAYRKMRTMELIKVDDLSRESLDALAHILTLNTEREGIEEAIRDRFTNKEFNQEQINELVLFRKNNSSLFGKGWHNFSLKLMKELIPELYETSEEQMTILTRLGKQRVKKSSNRTNYIDEKELTEEIYNPVVAKSVRQAIKIINLATKKYGVFDNIVIEMARESNEDDEKKAIQNAQKANEDEKKAALLKAAHQFNGKEELPDSIFHGHKELLTKIRLWHQQGEKCLYTGKTIFINDLIHNPYKYEIDHILPLSLSFDDSLANKVLVLSTANQEKGQRTPFQSLDSMDGAWTYREFKSYVKGLKTLSNKKKDYLLTEENIDKIEVKQKFIERNLVDTRYSSRVVLNALQDFYKERKFDTKISVVRGQFTSQLRRKWRIEKTRETYHHHAVDALIIAASSQLNLWKKQNNPLISYKEDQFVDPETGEILSLSDDEYKKLVFKAPYEHFVDTLKSKKFEDSILFSYQVDSKYNRKISGATICGTRKAQLGKDTQEETYVLGKIKDIYSQKGYEDFIKKYKKDKTQFLMYHKDPQTFEKVIEEILKTYPDKELNEKGKEVSCNPFEKYRQENGPVRKYSKKGNGPEIKSLKYYDEVLGKNIDITPKNSLNKVVLRSLNPWRTDVYFNHETRKYEFLGLKYSDLRYLKGEHRYGILIGDYKKIKDKEGIEKESEFKFTLYKNDLILIKDTAKGKEELFRFWSRTGKDNAKTFEKNKIELKPYSKSQFEKGEDTNVLGKLYASSNQLQKSFGTLENLSIYKVRTDVLGNKYFIKKEGDKPQLNFKKKL

SEQ ID NO: 666 - protein, 1134 aa, Streptococcus mutans; identical to SEQ ID NO: 665

SEQ ID NO: 667 - protein, 1128 aa, Streptococcus mutans
MANSKILGLDIGIASVGVGIIDKETGKIIHVNSRIFPAATADSNVERRGFRQGRRLVRRKKHRKVRLADLFLDSNLLTDFSKVSLNLNPYQLRVKGLNEELSNEELFIALKSIVSRRGISYLDDASEDSGANSSEYGKAVEENRKLLEDRTPGQIQLERFEKYGKVRGDFTVVENGENHRLINVFSTSAYKKEAERILRRQQEFNIRIADEFIEAYLTILTGKRKYYHGPGNEKSRTDYGRFRTDGTTLDNIFGILIGKCTFYPDEYRAAKASYTAQEFNLLNDLNNLTVPTETKKLSEEQKRQIIEHAKTVKTLGAPTLLKYIAKLVGCSADDIKGYRIDKSDKPEIHTFEAYRKMRTMELIKVADLSRESLDALAHILTLNTEREGIEEAIRDRFTNKEFNQEQINELVLFRKNNSSLFGKGWHNFSLKLMKELIPELYETSEEQMTILTRLGKQRVKKSSNRTNYIDEKELTEEIYNPVVAKSVRQAIKIINLATKKYGVFDNIVIEMARESNEDDEKKAIQNAQKANEDEKEAALLKAAHQFNGKEELPDSIFHGHKELLTKIRLWHQQGEKCLYTGKTIFINDLIHNPYKYEIDHILPLSLSFDDSLANKVLVLSTANQEKGQRTPFQSLDSMDGAWTYREFKAYVKGLKTLSNKKKDYLLNEEDINKNEVKQKFIERNLVDTRYSSRVVLNTLQDFYKKREFDTKISVVRGQFTSQIRRKWRIEKTRETYHHHAVDALIIAASSQLNLWKKQNNPLISYKEDQFVDPETGEILSLSDDEYKELVFKAPYDHFVDTLKSKKFEDSILFSYQVDSKYNRKISDATIYGTRKARLGKDSQEETYVLGKIKDIYSQKGYEDFIKKYKKDKTQFLMYHKDPQTFEKVIEEILKTYSDKELNEKGKEVPCNPFEKYRQENGPVRKYSKKGNGPEIKSIKYYDNKLGNHIDITPNNSHHQVVLQSLKPWRTDVYFNPKSGKYELMGLKYSDLRFEKVSGDYGISVKKYNEIKSKEGVDENSEFKFTLYKNDLILIKDTESGEQELFRFLSRTMPNQKHYVELKPYDKSKFEGHQKLMDIFGEVAKGGQCLKGLNKSNISIYKVKTDVLGNKYFIKKEGDQPQLNFKKKI

SEQ ID NO: 668 - protein, 1128 aa, Streptococcus mutans; identical to SEQ ID NO: 667

SEQ ID NO: 669 - protein, 1338 aa, Streptococcus mutans
MDLIGTNSVGWAVVTDDYKVPAKKMKVLGNTDKSHIKKNLLGALLFDSGNTAADRRLKRTARRRYTRRRNRILYLQEIFAEEMSKVDDSFFHRLEDSFLVTEDKRGERHPIFGNLEEEVKYHENFPTIYHLRQYLADNPEKVDLRLVYLALAHIIKFRGHFLIEGKFDTRNNDVQRLFQEFLAVYDNTFENSSLQEQNVQVEEILTDKISKSAKKDRVLKLFPNEKSNGRFAEFLKLIVGNQADFKKHFELEEKAPLQFSKDTYEEELEVLLAQIGDNYAELFLSAKKLYDSILLSGILTVTDVSTKAPLSASMIQRYNEHQMDLAQLKQFIRQKLSDKYNEVFSDVSKDGYAGYIDGKTNQEAFYKYLKGLLNKIEGSGYFLDKIEREDFLRKQRTFDNGSIPHQIHLQEMRAIIRRQAEFYPFLADNQDRIEKILTFRIPYYVGPLARGKSDFAWLSRKSADKITPWNFDEIVDKESSAEAFINRMTNYDLYLPNQKVLPKHSLLYEKFTVYNELTKVKYKTEQGKTAFFDANMKQEIFDGVFKVYRKVTKDKLMDFLEKEFDEFRIVDLTGLDKENKAFNASYGTYHDLRKILDKDFLDNSKNEKILEDIVLTLTLFEDREMIRKRLENYSDLLTKEQVKKLERRHYTGWGRLSAELIHGIRNKESRKTILDYLIDDGNSNRNFMQLINDDALSFKEEIAKAQVIGETDNLNQVVSDIAGSPAIKKGILQSLKIVDELVKIMGHQPENIVVEMARENQFTNQGRRNSQQRLKGLTDSIKEFGSQILKEHPVEHSQLQNDRLFLYYLQNGRDMYTGEELDIDYLSQYDIDHIIPQAFIKDNSIDNRVLTSSKENRGKSDDVPSKNVVRKMKSYWSKLLSAKLITQRKFDNLTKAERGGLTDDDKAGFIKRQLVETRQITKHVARILDERFHTETDENNKKIRQVKIVTLKSNLVSNFRKEFELYKVREINDYHHAHDAYLNAVIGKALLGVYPQLEPEFVYGDYPHFHGHKENKATAKKFFYSNIMNFFKKDDVRTDKNGEIIWKKDEHISNIKKVLSYPQVNIVKKVEEQTGGFSKESILPKGNSDKLIPRKTKKFYWDTKKYGGFDSPIVAYSILVIADIEKGKSKKLKTVKALVGVTIMEKMTFERDPVAFLERKGYRNVQEENIIKLPKYSLFKLENGRKRLLASARELQKGNEIVLPNHLGTLLYHAKNIHKVDEPKHLDYVDKHKDEFKELLDVVSNFSKKYTLAEGNLEKIKELYAQNNGEDLKELASSFINLLTFTAIGAPATFKFFDKNIDRKRYTSTTEILNATLIHQSITGLYETRIDLSKLGGD

SEQ ID NO: 670 - protein, 1338 aa, Streptococcus mutans; identical to SEQ ID NO: 669

SEQ ID NO: 671 - protein, 1345 aa, Streptococcus mutans
MKKPYSIGLDIGTNSVGWAVVTDDYKVPAKKMKVLGNTDKSHIEKNLLGALLFDSGNTAEDRRLKRTARRRYTRRRNRILYLQEIFSEEMGKVDDSFFHRLEDFFLVTEDKRGERHPIFGNLEEEVKYHENFPTIYHLRQYLADNPEKVDLRLVYLALAHIIKFRGHFLIEGKFDTRNNDVQRLFQEFLAVYDNTFENSSLQEQNVQVEEILTDKISKSAKKDRVLKLFPNEKSNGRFAEFLKLIVGNQADFKKHFELEEKAPLQFSKDTYEEELEVLLAQIGDNYAELFLSAKKLYDSILLSGILTADDSSTKAPLSASMIQRYNEHQMDLAQLKQFIRQKLSDKYNEVFSDVSKDGYAGYIDGKTNQEAFYKYLKGLLNKIEGSGYFLDKIEREDFLRKQRTFDNGSIPHQIHLQEMRAIIRRQSEFYPFLADNQDRIEKILTFRIPYYVGPLARGKSDFAWLSRKSADKITPWNFDEIVDKESSAEAFINRMTNYDLYLPNQKVLPKHSLLYEKFTVYNELTKVKYKTEQGETAFFDANMKQEIFDGVFKVYRKVTKDKLMDFLEKEFDEFRIVDLTGLDKENKAFNASYGTYHDLRKILDKDFLDNSKNEKILEDIVLTLTLFEDREMIRKRLKNYSDLLTKEQLKKLERRHYTGWGRLSAELIHGIRNKESRKTILDYLIDDGNSNRNFMQLINDDALSFKEEIAKAQVIGETDNLNQVVSDIAGSPAIKKGILQSLKIVDELVKIMGHQPENIVVEMARENQFTNQGRRNSQQRLKGLTDSIKEFGSQILKEHPVENSQLQNDRLFLYYLQNGRDMYTGEELDIDYLSQYDIDHIIPQAFIKDNSIDNRVLTSSKENRGKSDDVPSKDVVRKMKPYWSKLLSAKLITQRKFDNLTKAERGGLTDDDKAGFIKRQLVETRQITKHVARILDERFNTETDENNKKIRQVKIVTLKSNLVSNFRKEFELYKVREINDYHHAHDAYLNAVIGKALLGVYPQLEPEFVYGDYPHFHGHEENKATAKKFFYSNIMNFFKKDDVRTDKNGEIIWKKDEHISNIKKVLSYPQVNIVKKVEEQTGGFSKESILPKGNSDKLIPRKTKKFYWDTKKYGGFDSPIVAYSILVIADIEKGKSKKLKTVKALVGVTIMEKMTFERDPVAFLERKGYRNVQEENIIKLPKYSLFKLENGRKRLLASARELQKGNEIVLPNHLGTLLYHAKNIHKVDEPKHLDYVDKHKDEFKELLDVVSNFSKKYTLAEGNLEKIKELYAQNNGEDLKELASSFINLLTFTAIGAPATFKFFDKNIDRKRYTSTTEILNATLIHQSITGLYETRIDLSKLGGD

SEQ ID NO: 672 - protein, 1345 aa, Streptococcus mutans; identical to SEQ ID NO: 671

SEQ ID NO: 673 - protein, 1229 aa, Streptococcus mutans
MKKPYSIGLDIGTNSVGWAVVTDDYKVPAKKMKVLGNTDKSHIEKNLLGALLFDSGNTAEDRRLKRTARRRYTRRRNRILYLQEIFSEEMGKVDDSFFHRLEDSFLVTEDKRGERHPIFGNLEEEVKYHENFPTIYHLRQYLADNPEKVDLRLVYLALAHIIKFRGHFLIEGKFDTRNNDVQRLFQEFLAVYDNTFENSSLQEQNIQVEEILTDKISKSAKKDRVLKLFPNEKSNGRFAEFLKLIVGNQADFKKHFELEEKAPLQFSKDTYEEELEVLLAQIGDNYAELFLSAKKLYDSILLSGILTVTDVGTKAPLSASMIQRYNEHQMDLTQLKQFIRQKLSDKYNEVFSDVSKDGYAGYIDGKTNQEAFYKYLKGLLNKIEGSGYFLDKIEREDFLRKQRTFDNGSIPHQIHLQEMRAIIRRQAEFYPFLADNQDRIEKILTFRIPYYVGPLARGKSDFAWLSRKSADKITPWNFDEIVDKESSAEAFINRMTNYDLYLPNQKVLPKHSLLYEKFTVYNELTKVKYKTEQGKTAFFDANMKQEIFDGVFKVYRKVTKDKLMDFLEKEFDEFRIVDLTGLDKENKVFNASYGTYHDLCKILDKDFLDNSKNEKILEDIVLTLTLFEDREMIRKRLENYSDLLTKEQVKKLERRHYTGWGRLSAELIHGIRNKESRKTILDYLIDDGNSNRNFMQLINDDALSFKEEIAKAQVIGETDNLNQVVSDIAGSPAIKKGILQSLKIVDELVKIMGHQPENIVVEMARENQFTNQGRRNSQQRLKGLTDSIKEFGSQILKEHPVENSQLQNDRLFLYYLQNGRDMYTGEELDIDYLSQYDIDHIIPQAFIKDNSIDNRVLTSSKENRGKSDDVPSKDVVRKMKPYWSKLLSAKLITQRKFDNLTKAERGGLTDDDKAGFIKRQLVETRQITKHVARILDERFNTETDENNKKIRQVKIVTLKSNLVSNFRKEFELYKVREINDYHHAHDAYLNAVIGKALLGVYPQLEPEFVYGDYPHFHGHEENKATAKKFFYSNIMNFFKKDDVRTDKNGEIIWKKDEHISNIKKVLSYPQVNIVKKVEEQTIGQNGGLFDDNPKSPLEVIPSKLVPLKKALNPEKYGGYQKPTTAYPILLIVDTKQLIPISVMDKKRFEQNPVKFLKDKGYQQIEKNNFVKLPKYTLVDIGNGIKRLWASSKEVHKGNQLVVSKKSQDLLYHAHHLDNDYSNEYVKNHY

SEQ ID NO: 674 - protein, 1229 aa, Streptococcus mutans; identical to SEQ ID NO: 673

SEQ ID NO: 675 - protein, 1345 aa, Streptococcus mutans
MKKPYSIGLDIGTNSVGWAVVTDDYKVPAKKMKVLGNTDKSHIEKNLLGALLFDSGNTAEDRRLKRTARRRYTRRRNRILYLQEIFSEEMGKVDDSFFHRLEDSFLVTEDKRGERHPIFGNLEEEVKYHENFPTIYHLRQYLADNPEKVDLRLVYLALAHIIKFRGHFLIEGKFDTRNNDVQRLFQEFLAVYDNTFENSSLQEQNVQVEEILTDKISKSAKKDRVLKLFPNEKSNGRFAEFLKLIVGNQADFKKHFELEEKAPLQFSKDTYEEELEVLLAQIGDNYAELFLSAKKLYDSILLSGILTVTDVGTKAPLSASMIQRYNEHQMDLAQLKQFIRQKLSDKYNEVFSDVSKDGYAGYIDGKTNQEAFYKYLKGLLNKIEGSGYFLDKIEREDFLRKQRTFDNGSIPHQIHLQEMRAIIRRQAEFYPFLADNQDRIEKLLTFRIPYYVGPLARGKSDFAWLSRKSADKITPWNFDEIVDKESSAEAFINRMTNYDLYLPNQKVLPKHSLLYEKFTVYNELIKVKYKTEQGKTAFFDANMKQEIFDGVFKVYRKVTKDKLMDFLEKEFDEFRIVDLTGLDKENKVFNASYGTYHDLCKILDKDFLDNSKNEKILEDIVLTLTLFEDREMIRKRLENYSDLLTKEQVKKLERRHYTGWGRLSAELIHGIRNKESRKTILDYLIDDGNSNRNFMQLINDDALSFKEEIAKAQVIGETDNLNQVVSDIAGSPAIKKGILQSLKIVDELVKIMGHQPENIVVEMARENQFTNQGRRNSQQRLKGLTDSIKEFGSQILKEHPVENSQLQNDRLFLYYLQNGRDMYTGEELDIDYLSQYDIDHIIPQAFIKDNSIDNRVLTSSKENRGKSDDVPSKDVVRKMKSYWSKLLSAKLITQRKFDNLTKAERGGLTDDDKAGFIKRQLVETRQITKHVARILDERFNTETDENNKKIRQVKIVTLKSNLVSNFRKEFELYKVREINDYHHAHDAYLNAVIGKALLGVYPQLEPEFVYGDYPHFHGHKENKATAKKFFYSNIMNFFKKDDVRTDKNGEIIWKKDEHISNIKKVLSYPQVNIVKKVEEQTGGFSKESILPKGNSDKLIPRKTKKFYWDTKKYGGFDSPIVAYSILVIADIEKGKSKKLKTVKALVGVTIMEKMTFERDPVAFLERKGYRNVQEENIIKLPKYSLFKLENGRKRLLASARELQKGNEIVLPNHLGTLLYHAKNIHKVDEPKHLDYVDKHKDEFKELLDVVSNFSKKYTLAEGNLEKIKELYAQNNGEDLKELASSFINLLTFTAIGAPATFKFFDKNIDRKRYTSTTEILNATLIHQSITGLYETRIDLNKLGGD

SEQ ID NO: 676 - protein, 1350 aa, Streptococcus mutans
MKKPYSIGLDIGTNSVGWAVVTDDYKVPAKKMKVLGNTDKSHIEKNLLGALLFDSGNTAEDRRLKRTARRRYTRRRNRILYLQEIFSEEMGKVDDSFFHRLEDSFLVTEDKRGERHPIFGNLEEEVKYHENFPTIYHLRQYLADNPEKVDLRLVYLALAHIIKFRGHFLIEGKFDTRNNDVQRLFQEFLAVYDNTFENSSLQEQNVQVEEILTDKISKSAKKDRVLKLFPNEKSNGRFAEFLKLIVGNQADFKKHFELEEKAPLQFSKDTYEEELEVLLAQIGDNYAELFLSAKKLYDSILLSGILTVTDVSTKAPLSASMIQRYNEHQMDLTQLKQFIRQKLSDKYNEVFSDVSKDGYAGYIDGKTNQEAFYKYLKGLLNKIEGSGYFLDKIEREDFLRKQRTFDNGSIPHQIHLQEMRAIIRRQAEFYSFLADNQDRIEKILTFRIPYYVGPLARGKSDFAWLSRKSADKITPWNFDEIVDKESSAEAFINRMTNYDLYLPNQKVLPKHSLLYEKFTVYNELTKVKYKTEQGKTAFFDANMKQEIFDGVFKVYRKVTKDKLMDFLEKEFDEFRIVDLTGLDKENKAFNASYGTYHDLRKILDKDFLDNSKNEKILEDIVLTLTLFEDREMIRKRLENYSDLLTKEQVKKLERRHYTGWGRLSAELIHGIRNKESRKTILDYLIDDGNSNRNFMQLINDDALSFKEEIAKAQVIGETDNLNQVVSDIAGSPAIKKGILQSLKIVDELVKIMGHQPENIVVEMARENQFTNQGRRNSQQRLKGLTDSIKEFGSQILKEHPVENSQLQNDRLFLYYLQNGRDMYTGEELDIDYLSQYDIDHIIPQAFIKDNSIDNRVLTSSKENRGKSDDVPSEDVVNRMRPFWNKLLSSGLISQRKYNNLTKKELTLDDKAGFIKRQLVETRQITKHVARMLDERFNKEFDDNNKRIRKVKIVTLKSNLVSSFRKEFELYKVREINDYHHAHDAYLNAVVVKALLVKYSKLEPEFVYGEYPKYNSYRERKTATQKMFFYSNIMNMFKSKVKLADDQIVERPMIEVNDETGEIAWDKTKHITTVKKVLSYPQVNIVKKVEEQTIGQNGGLFDDNPKSPLEVIPSKLVPLKKALNPEKYGGYQKPTTAYPILLIVDTKQLIPISVMDKKRFEQNPVKFLKDKGYQQIEKNNFVKLPKYTLVDIGNGIKRLWASSKEVHKGNQLVVSKKSQDLLYHAHHLDNDYSNEYVKNHYQQFDILFNEITSFSKKCKLGKEHIQKIEEAYSKERDSASIEELADGFIKLLGFTQLGATSPFSFLGIKLNQKQYTGKKDYLLPCMEATLIHQSITGLYETRIDLSKLGGD

SEQ ID NO: 677 - protein, 1350 aa, Streptococcus mutans
MKKPYSIGLDIGTNSVGWAVVTDDYKVPAKKMKVLGNTDKSHIEKNLLGALLFDSGNTAEDRRLKRTARRRYTRRRNRILYLQEIFSEEMGKVDDSFFHRLEDSFLVTEDKRGERHPIFGNLEEEVKYHENFPTIYHLRQYLADNPEKVDLRLVYLALAHIIKFRGHFLIEGKFDTRNNDVQRLFQEFLAVYDNTFENSSLQEQNVQVEEILTDKISKSAKKDRVLKLFPNEKSNGRFAEFLKLIVGNQADFKKHFELEEKAPLQFSKDTYEEELEVLLAQIGDNYAELFLSAKKLYDSILLSGILTVTDVSTKAPLSASMIQRYNEHQMDLTQLKQFIRQKLSDKYNEVFSDVSKDGYAGYIDGKTNQEAFYKYLKGLLNKIEGSGYFLDKIEREDFLRKQRTFDNGSIPHQIHLQEMRAIIRRQAEFYPFLADNQDRIEKILTFRIPYYVGPLARGKSDFAWLSRKSADKITPWNFDEIVDKESSAEAFINRMTNYDLYLPNQKVLPKHSLLYEKFTVYNELTKVKYKTEQGKTAFFDANMKQEIFDGVFKVYRKVTKDKLMDFLEKEFDEFRIVDLTGLDKENKAFNASYGTYHDLRKILDKDFLDNSKNEKILEDIVLTLTLFEDREMIRKRLKNYSDLLTKEQLKKLERRHYTGWGRLSAELIHGIRNKESRKTILDYLIDDGNSNRNFMQLINDDALSFKEEIAKAQVIGETDNLNQVVSDIAGSPAIKKGILQSLKIVDELVKIMGHQPENIVVEMARENQFTNQGRQNSQQRLKGLTDSIKEFGSQILKEHPVENSQLQNDRLFLYYLQNGRDMYTGEELDIDYLSQYDIDHIIPQAFIKDNSIDNRVLTSSKENRGKSDDVPSEDVVNRMRPFWNKLLSSGLISQRKYNNLTKKELTLDDKAGFIKRQLVETRQITKHVARMLDERFNKEFDDNNKRICKVKIVTLKSNLVSSFRKEFELYKVREINDYHHAHDAYLNAVVVKALLVKYSKLEPEFVYGEYPKYNSYRERKTATQKMFFYSNIMNMFKSKVKLADDQIVERPMIEVNDETGEIAWDKTKHITTVKKVLSYPQVNIVKKVEEQTIGQNGGLFDDNPKSPLEVIPSKLVPLKKALNPEKYGGYQKPTTAYPILLIVDTKQLIPISVMDKKRFEQNPVKFLKDKGYQQIEKNNFVKLPKYTLVDIGNGIKRLWASSKEVHKGNQLVVSKKSQDLLYHAHHLDNDYSNEYVKNHYQQFDILFNEITSFSKKCKLGKEHIQKIEEAYSKERDSASIEELADGFIKLLGFTQLGATSPFSFLGIKLNQKQYTGKKDYLLPCMEATLIHQSITGLYETRIDLSKLGGD

SEQ ID NO: 678 - protein, 1345 aa, Streptococcus mutans; identical to SEQ ID NO: 675

SEQ ID NO: 679 - protein, 1350 aa, Streptococcus mutans; identical to SEQ ID NO: 676

SEQ ID NO: 680 - protein, 1350 aa, Streptococcus mutans; identical to SEQ ID NO: 677

SEQ ID NO: 681 - protein, 1345 aa, Streptococcus mutans
MKKPYSIGLDIGTNSVGWAVVTDDYKVPAKKMKVLGNTDKSHIKKNLLGALLFDSGNTAADRRLKRTARRRYTRRRNRILYLQEIFAEEMSKVDDSFFHRLEDSFLVTEDKRGERHPIFGNLEEEVKYHENFPTIYHLRQYLADNPEKVDLRLVYLALAHIIKFRGHFLIEGKFDTRNNDVQRLFQEFLAVYDNTFENSSLQEQNVQVEEILTDKISKSAKKDRVLKLFPNEKSNGRFAEFLKLIVGNQADFKKHFELEEKAPLQFSKDTYEEELEVLLTQIGDNYAELFLSAKKLYDSILLSGILTVTDVSTKAPLSASMIQRYNEHQMDLAQLKQFIRQKLSDKYNEVFSDVSKDGYAGYIDGKTNQEAFYKYLKGLLNKIEGSGYFLDKIEREDFLRKQRTFDNGSIPHQIHLQEMRAIIRRQAEFYPFLADNQDRIEKILTFRIPYYVGPLARGKSDFAWLSRKSADKITPWNFDEIVDKESSAEAFINRMTNYDLYLPNQKVLPKHSLLYEKFTVYNELTKVKYKTEQGKTAFFDANMKQEIFDGVFKVYRKVTKDKLMDFLEKEFDEFRIVDLTGLDKENKAFNASYGTYHDLRKILDKDFLDNSKNEKILEDIVLTLTLFEDREMIRKRLENYSDLLTKEQVKKLERRHYTGWGRLSAELIHGIRNKESRKTLLDYLIDDGNSNRNFMQLINDDALSFKEEIAKAQVIGETDNLNQVVSDIAGSPAIKKGILQSLKIVDELVKIMGHQPENIVVEMARENQFTNQGRRNSQQRLKGLTDSIKEFGSQILKEHPVENSQLQNDRLFLYYLQNGRDMYTGEELDIDYLSQYDIDHIIPQAFIKDNSIDNRVLTSSKENRGKSDDVPSKDVVRKMKPYWSKLLSAKLITQRKFDNLTKAERGGLTDDDKAGFIKRQLVETRQITKHVARILDERFNTETDENNKKIRQVKIVTLKSNLVSNFRKEFELYKVREINDYHHAHDAYLNAVIGKALLGVYPQLEPEFVYGDYPHFHGHEENKATAKKFFYSNIMNFFKKDDVRTDKNGEIIWKKDEHISNIKKVLSYPQVNIVKKVEEQTGGFSKESILPKGNSDKLIPRKTKKFYWDTKKYGGFDSPIVAYSILVIADIEKGKSKKLKTVKALVGVTIMEKMTFERDPVAFLERKGYRNVQEENIIKLPKYSLFKLENGRKRLLASARELQKGNEIVLPNHLGTLLYHAKNIHKVDEPKHLDYVDKHKDEFKELLDVVSNFSKKYTLAEGNLEKIKELYAQNNGEDLKELSSSFINLLTFTAIGAPAAFKFFDKNIDRKRYTSTTEILNATLIHQSITGLYETRIDLSKLGGD

SEQ ID NO: 682 - protein, 1345 aa, Streptococcus mutans
MKKPYSIGLDIGTNSVGWAVVTDDYKVPAKKMKVLGNTDKSHIKKNLLGALLFDSGNTAADRRLKRTARRRYTRRRNRILYLQEIFAEEMSKVDDSFFHRLEDSFLVTEDKRGERHPIFGNLEEEVKYHENFPTIYHLRQYLADNPEKVDLRLVYLALAHIIKFRGHFLIEGKFDTRNNDVQRLFQEFLAVYDNTFENSSLQEQNVQVEEILTDKISKSAKKDRVLKLFPNEKSNGRFAEFLKLIVGNQADFKKHFELEEKAPLQFSKDTYEEELEVLLAQIGDNYAELFLSAKKLYDSILLSGILTVTDVSTKAPLSASMIQRYNEHQMDLAQLKQFIRQKLSDKYNEVFSDVSKDGYAGYIDGKTNQEAFYKYLKGLLNKIEGSGYFLDKIEREDFLRKQRTFDNGSIPHQIHLQEMRAIIRRQAEFYPFLADNQDRIEKILTFRIPYYVGPLARGKSDFAWLSRKSADKITPWNFDEIVDKESSAEAFINRMTNYDLYLPNQKVLPKHSLLYEKFTVYNELTKVKYKTEQGKTAFFDANMKQEIFDGVFKVYRKVTKDKLMDFLEKEFDEFRIVDLTGLDKENKAFNASYGTYHDLRKILDKDFLDNSKNEKILEDIVLTLTLFEDREMIRKRLENYSDLLTKEQVKKLERRHYTGWGRLSAELIHGIRNKESRKTILDYLIDDGNSNRNFMQLINDDALSFKEEIAKAQVIGETDNLNQVVSDIAGSPAIKKGILQSLKIVDELVKIMGHQPENIVVEMARENQFTNQGRRNSQQRLKGLTDSIKEFGSQILKEHPVEHSQLQNDRLFLYYLQNGRDMYTGEELDIDYLSQYDIDHIIPQAFIKDNSIDNRVLTSSKENRGKSDDVPSKNVVRKMKSYWSKLLSAKLITQRKFDNLTKAERGGLTDDDKAGFIKRQLVETRQITKHVARILDERFHTETDENNKKIRQVKIVTLKSNLVSNFRKEFELYKVREINDYHHAHDAYLNAVIGKALLGVYPQLEPEFVYGDYPHFHGHKENKATAKKFFYSNIMNFFKKDDVRTDKNGEIIWKKDEHISNIKKVLSYPQVNIVKKVEEQTGGFSKESILPKGNSDKLIPRKTKKFYWDTKKYGGFDSPIVAYSILVIADIEKGKSKKLKTVKALVGVTIMEKMTFERDPVAFLERKGYRNVQEENIIKLPKYSLFKLENGRKRLLASARELQKGNEIVLPNHLGTLLYHAKNIHKVDEPKHLDYVDKHKDEFKELLDVVSNFSKKYTLAEGNLEKIKELYAQNNGEDLKELASSFINLLTFTAIGAPATFKFFDKNIDRKRYTSTTEILNATLIHQSITGLYETRIDLSKLGGD

SEQ ID NO: 683 - protein, 1345 aa, Streptococcus mutans
MKKPYSIGLDIGTNSVGWAVVTDDYKVPAKKMKVLGNTDKSHIKKNLLGALLFDSGNTAADRRLKRTARRRYTRRRNRILYLQEIFAEEMSKVDDSFFHRLEDSFLVTEDKRGERHPIFGNLEEEVKYHENFPTIYHLRQYLADNPEKVDLRLVYLALAHIIKFRGHFLIEGKFDTRNNDVQRLFQEFLAVYDNTFENSSLQEQNVQVEEILTDKISKSAKKDRVLKLFPNEKSNGRFAEFLKLIVGNQADFKKHFELEEKAPLQFSKDTYEEELEVLLAQIGDNYAELFLSAKKLYDSILLSGILTVTDVSTKAPLSASMIQRYNEHQMDLAQLKQFIRQKLSDKYNEVFSDVSKDGYAGYIDGKTNQEAFYKYLKGLLNKIEGSGYFLDKIEREDFLRKQRTFDNGSIPHQIHLQEMRAIIRRQAEFYPFLADNQDRIEKILTFRIPYYVGPLARGKSDFAWLSRKSADKITPWNFDEIVDKESSAEAFINRMTNYDLYLPNQKVLPKHSLLYEKFTVYNELTKVKYKTEQGKTAFFDANMKQEIFDGVFKVYRKVTKDKLMDFLEKEFDEFRIVDLTGLDKENKVFNASYGTYHDLCKILDKDFLDNSKNEKILEDIVLTLTLFEDREMIRKRLENYSDLLTKEQVKKLERRHYTGWGRLSAELIHGIRNKESRKTILDYLIDDGNSNRNFMQLINDDALSFKEEIAKAQVIGETDNLNQVVSDIAGSPAIKKGILQSLKIVDELVKIMGHQPENIVVEMARENQFTKQGRRNSQQRLKGLTDSIKEFGSQILKEHPVENSQLQNDRLFLYYLQNGRDMYTGEELDIDYLSQYDIDHIIPQAFIKDNSIDNRVLTSSKENRGKSDDVPSKDVVRKMKSYWSKLLSAKLITQRKFDNLTKAERGGLTDDDKAGFIKRQLVETRQITKHVARILDERFYTETDENNKKIRQVKIVTLKSNLVSNFRKEFELYKVREINDYHHAHDAYLNAVIGKALLGVYPQLEPEFVYGDYPHFHGHKENKATAKKFFYSNIMNFFKKDDVRTDKNGEIIWKKDEHISNIKKVLSYPQVNIVKKVEEQTGGFSKESILPKGNSDKLIPRKTKKFYWDTKKYGGFDSPIVAYSILVIADIEKGKSKKLKTVKALVGVTIMEKMTFERDPVAFLERKGYRNVQEENIIKLPKYSLFKLENGRKRLLASARELQKGNEIVLPNHLGTLLYHAKNIHKVDEPKHLDYVDKHKDEFKELLDVVSNFSKKYTLAEGNLEKIKELYAQNNGEDLKELASSFINLLTFTAIGAPATFKFFDKNIDRKRYTSTTEILNATLIHQSITGLYETRIDLSKLGGD

SEQ ID NO: 684 - protein, 1345 aa, Streptococcus mutans
MKKPYSIGLDIGTNSVGWAVVTDDYKVPAKKMKVLGNTDKSHIKKNLLGALLFDSGNTAADRRLKRTARRRYTRRRNRILYLQEIFAEEMSKVDDSFFHRLEDSFLVTEDKRGERHPIFGNLEEEVKYHENFPTIYHLRQYLADNPEKVDLRLVYLALAHIIKFRGHFLIEGKFDTRNNDVQRLFQEFLAVYDNTFENSSLQEQNVQVEEILTDKISKSAKKDRVLKLFPNEKSNGRFAEFLKLIVGNQADFKKHFELEEKAPLQFSKDTYEEELEVLLAQIGDNYAELFLSAKKLYDSILLSGILTVTDVSTKAPLSASMIQRYNEHQMDLAQLKQFIRQKLSDKYNEVFSDVSKDGYAGYIDGKTNQEAFYKYLKGLLNKIEGSGYFLDKIEREDFLRKQRTFDNGSIPHQIHLQEMRAIIRRQAEFYPFLADNQDRIEKILTFRIPYYVGPLARGKSDFAWLSRKSADKITPWNFDEIVDKESSAEAFINRMTNYDLYLPNQKVLPKHSLLYEKFTVYNELTKVKYKTEQGKTAFFDANMKQEIFDGVFKVYRKVTKDKLMDFLEKEFDEFRIVDLTGLDKENKAFNASYGTYHDLRKILDKDFLDNSKNEKILEDIVLTLTLFEDREMIRKRLENYSDLLTKEQVKKLERRHYTGWGRLSAELIHGIRNKESRKTILDYLIDDGNSNRNFMQLINDDALSFKEEIAKAQVIGETDNLNQVVSDIAGSPAIKKGILQSLKIVDELVKIMGHQPENIVVEMARENQFTNQGRRNSQQRLKGLTDSIKEFGSQILKEHPVENSQLQNDRLFLYYLQNGRDMYTGEELDIDYLSQYDIDHIIPQAFIKDNSIDNRVLTSSKENRGKSDDVPSKNVVRKMKSYWSKLLSAKLITQRKFDNLTKAERGGLTDDDKAGFIKRQLVETRQITKHVARILDERFHTETDENNKKIRQVKIVTLKSNLVSNFRKEFELYKVREINDYHHAHDAYLNAVIGKALLGVYPQLEPEFVYGDYPHFHGHKENKATAKKFFYSNIMNFFKKDDVRTDKNGEIIWKKDEHISNIKKVLSYPQVNIVKKVEEQTGGFSKESILPKGNSDKLIPRKTKKFYWDTKKYGGFDSPIVAYSILVIADIEKGKSKKLKTVKALVGVTIMEKMTFERDPVAFLERKGYRNVQEENIIKLPKYSLFKLENGRKRLLASARELQKGNEIVLPNHLGTLLYHAKNIHKVDEPKHLDYVDKHKDEFKELLDVVSNFSKKYTLAEGNLEKIKELYAQNNGEDLKELSSSFINLLTFTAIGAPAAFKFFDKNIDRKRYTSTTEILNATLIHQSITGLYETRIDLSKLGGD

SEQ ID NO: 685 - protein, 1345 aa, Streptococcus mutans; identical to SEQ ID NO: 681

SEQ ID NO: 686 - protein, 1345 aa, Streptococcus mutans; identical to SEQ ID NO: 682

SEQ ID NO: 687 - protein, 1345 aa, Streptococcus mutans; identical to SEQ ID NO: 683

SEQ ID NO: 688 - protein, 1345 aa, Streptococcus mutans; identical to SEQ ID NO: 684

SEQ ID NO: 689 - protein, 1345 aa, Streptococcus mutans; identical to SEQ ID NO: 682

SEQ ID NO: 690 - protein, 1345 aa, Streptococcus mutans; identical to SEQ ID NO: 682

SEQ ID NO: 691 - protein, 1345 aa, Streptococcus mutans; identical to SEQ ID NO: 682

SEQ ID NO: 692 - protein, 1345 aa, Streptococcus mutans; identical to SEQ ID NO: 682

SEQ ID NO: 693 - protein, 1359 aa, Streptococcus mutans
MKKPYSIGLDIGTNSVGWAVVTDDYKVPAKKMKVLGNTDKSHIKKNLLGALLFDSGNTAEDRRLKRTARRRYTRRRNRILYLQEIFAEEMMQVDESFFQRLDDSFLVEEDKRGSRYPIFGTLKEEKKYHKEFKTIYHLREKLANSTEKADLRLVYLSLAHMIKFRGHFLIEGQLKAENTNVQALFKDFVEVYDKTVEESHLSEMTVDALSILTEKVSKSRRLENLVECYPTEKKNTLFGNLIALSLGLQPNFKTNFQLSEDAKLQFSKDTYEEDLEGLLGEIGDEYADLFASAKNLYDAILLSGILAVDDNTTKAPLSASMVKRYKEHKEELAAFKRFIKEKLPKKYEEIFKDDTKNGYAGYVGADKKLRKRSGKLATEEEFYKYVKGILNKVEGADVWLDKIDREDFLRKQRTFDNGSIPHQIHLQEMHAILRRQGEHYPFLKENQDKIEKILTFRIPYYVGPLVRKGSRFAWAEYKADEKITPWNFDDILDKEKSAEKFITRMTLNDLYLPEEKVLPKHSLLYETFTVYNELTKVKYVNEQGEAKFFDANMKQEIFDHVFKENRKVTKDKLLNYLNKEFEEFRIVNLTGLDKENKVFNSSLGTYHDLRKILNKSFLDNKENEQIIEDIIQTLTLFEDREMIRQRLQKYSDIFTKAQLKKLERRHYTGWGRLSYKLINGIRDKQSNKTILGYLIDDGYSNRNFMQLINDDALSFKEEIAKAQVIGEMDGLNQVVSDIAGSPAIKKGILQSLKIVDELVKVMGHNPANIVIEMARENQTTAKGRRSSQKRYKRLEEAIKNLDHDLNHKILKEHPTDNQALQNDRLFLYYLQNGRDMYTEDPLDINRLSDYDIDHIIPQAFIKDNSIDNRVLTRSDKNRGKSDDVPSEEVVHKMKPFWSKLLSAKLITQRKFDNLTKAERGGLTDDDKAGFIKRQLVETRQITKHVARILDERFNTETDENNKKIRQVKIVTLKSNLVSNFRKEFELYKVREINDYHHAHDAYLNAVIGKALLGVYPQLEPEFVYGDYPHFHGHKENKATAKKFFYSNIMNFFKKGDVRTDKNGEIIWKKDEHISNIKKVLSYPQVNIVKKVEEQTGGFSKESILPKGNSDKLIPRKTKKFYWDTKKYGGFDSPIVAYSILVIADIEKGKSKKLKTVKALVGVTIMEKMTFERDPVAFLERKGYRNVQEENIIKLPKYSLFKLENGRKRLLASARELQKGNEIVLPNHLETLLYHAKNIHKVDEPKHLDYVDKHKDEFKELLDVVSNFSKKYTLAEGNLEKIKELYAQNNGEDLKELASSFINLLTFTAIGAPAAFKFFDKNIDRKRYTSTTEILNATLIHQSITGLYETRIDLNKLGGD

SEQ ID NO: 694 - protein, 1359 aa, Streptococcus mutans; identical to SEQ ID NO: 693

SEQ ID NO: 695 - protein, 1355 aa, Streptococcus mutans
MKKPYSIGLDIGTNSVGWAVVTDDYKVPAKKMKVLGNTDKSHIKKNLLGALLFDSGNTAEDRRLKRTARRRYTRRRNRILYLQEIFAEEMSKVDDSFFHRLDESFLTDDDKNFDSHPIFGNKAEEDAYHQKFPTIYHLRKHLADSTEKADLRLVYLALAHMIKFRGHFLIEGELNAENTDVQKLFADFVGVYDRTFDDSHLSEITVDASSILTEKISKSRRLEKLINNYPKEKKNTLFGNLIALSLGLQPNFKTNFKLSEDAKLQFSKDTYEEDLEELLGKIGDDYADLFTLAKNLYDAILLSGILTADDSSTKAPLSASMIKRYAEHHEDLEKLKEFIKANKPELYHDIFKDETKNGYAGYIENGVKQDEFYKYLKNTLSKITGSDYFLDQIEREDFLRKQRTFDNGSIPHQIHLQEMHAILRRQGDYYPFLKENQDRIEKILTFRIPYYVGPLARKNSRFAWAEYHSDEAVTPWNFDQVIDKESSAQAFIEHMTNNDLYLPNEKVLPKHSPLYEKYTVYNELTKIKYVTEIGEAKFFDANLKQEIFDGLFKHERKVTKKKLRTFLDKNFDEFRIVDIQGLDKETETFNASYATYQDLLKVIKDKVFMDNPENAEILENIVLTLTLFEDREMIKQRLAKYADVFDKKVIDQLARRHYTGWGRLSAKLLNGIRDKQSCKTIMDYLIDDAQSNRNLMQLITDDNLTFKDDIVKAQYVDNSDDLHQVVQSLAGSPAIKKGILQSLKIVDELVKVMGKEPEQIVVEMARENQTTAKGRRNSQQRYKRLKEAIKSLDRDLNHKILKEHPTDNQALQNNRLFLYYLQNGRDMYTGESLDINRLSDYDIDHVIPQAFIKDNSIDNRVLTSSKANRGKSDDVPSEDVVNRMRPFWNKLLSSGLISQRKYNNLTKKELTLDDKAGFIKRQLVETRQITKHVARMLDERFNKEFDDNNKRIRRVKIVTLKSNLVSSFRKEFELYKVREINDYHHAHDAYLNAVVVKALLVKYPKLEPEFVYGEYPKYNSYRERKTATQKMFFYSNIMNMFKSKVKLADDQIVERPMIEVNDETGEIAWDKTKHITTVKKVLSYPQVNIVKKVEEQTIGQNGGLFDDNPKSPLEVIPSKLVPLKKALNPEKYGGYQKPTTAYPILLIVDTKQLIPISVMDKKRFEQNPVKFLKDKGYQQIEKNNFVKLPKYTLVDIGNGIKRLWASSKEVHKGNQLVVSKKSQDLLYHAHHLDNDYSNEYVKNHYQQFDILFNEITSFSKKCKLGKEHIQKIEEAYSKERDFASIEELADGFIKLLGFTQLGATSPFSFLGIKLNQKQYTGKKDYLLPCMEATLIHQSITGLYETRIDLSKLGGD

SEQ ID NO: 696 - protein, 1355 aa, Streptococcus mutans; identical to SEQ ID NO: 695

SEQ ID NO: 697 - protein, 1345 aa, Streptococcus mutans
MKKPYSIGLDIGTNSVGWAVVTDDYKVPAKKMKVLGNTDKSHIKKNLLGALLFDSGNTAEDRRLKRTARRRYTRRRNRILYLQEIFSEEMDKVDDSFFHRLEDSFLVTEDKRGERHPIFGNLEEEVKYHENFPTIYHLRQYLADNPEKVDLRLVYLALAHIIKFRGHFLIEGKFDTRNNDVQRLFQEFLAVYDNTFENSSLQEQNVQVEEILTDKISKSAKKDRVLKLFPNEKSNGRFAEFLKLIVGNQADFKKHFELEEKAPLQFSKDTYEEELEVLLAQIGDNYAELFLSAKKLYDSILLSGILTVTDVSTKAPLSASMIQRYNEHQMDLAQLKQFIRQKLSDKYNEVFSDVSKDGYAGYIDGKTNQEAFYKYLKGLLNKIEGSGYFLDKIEREDFLRKQRTFDNGSIPHQIHLQEMRAIIRRQAEFYPFLADNQDRIEKILTFRIPYYVGPLARGKSDFAWLSRKSADKITPWNFDEIVDKESSAEAFINRMTNYDLYLPNQKVLPKHSLLYEKFTVYNELTKVKYKTEQGKTAFFDANMKQEIFDGVFKVYRKVTKDKLMDFLEKEFDEFRIVDLTGLDKENKVFNASYGTYHDLCKILDKDFLDNSKNEKILEDIVLTLTLFEDREMIRKRLENYSDLLTKEQVKKLERRHYTGWGRLSAELIHGIRNKESRKTILDYLIDDGNSNRNFMQLINDDALSFKEEIAKAQVIGETDNLNQVVSDIAGSPAIKKGILQSLKIVDELVKIMGHQPENIVVEMARENQFTKQGRRNSQQRLKGLTDSIKEFGSQILKEHPVENSQLQNDRLFLYYLQNGRDMYTGEELDIDYLSQYDIDHIIPQAFIKDNSIDNRVLTSSKENRGKSDDVPSKDVVRKMKSYWSKLLSAKLITQRKFDNLTKAERGGLTDDDKAGFIKRQLVETRQITKHVARILDERFYTETDENNKKIRQVKIVTLKSNLVSNFRKEFELYKVREINDYHHAHDAYLNAVIGKALLGVYPQLEPEFVYGDYPHFHGHKENKATAKKFFYSNIMNFFKKDDVRTDKNGEIIWKKDEHISNIKKVLSYPQVNIVKKVEEQTGGFSKESILPKGNSDKLIPRKTKKFYWDTKKYGGFDSPIVAYSILVIADIEKGKSKKLKTVKALVGVTIMEKMTFERDPVAFLERKGYRNVQEENIIKLPKYSLFKLENGRKRLLASARELQKGNEIVLPNHLGTLLYHAKNIHKVDEPKHLDYVDKHKDEFKELLDVVSNFSKKYTLAEGNLEKIKELYAQNNGEDLKELASSFINLLTFTAIGAPATFKFFDKNIDRKRYTSTTEILNATLIHQSITGLYETRIDLSKLGGD

SEQ ID NO: 698 - protein, 1345 aa, Streptococcus mutans; identical to SEQ ID NO: 697

SEQ ID NO: 699 - protein, 1345 aa, Streptococcus mutans
MKKPYSIGLDIGTNSVGWAVVTDDYKVPAKKMKVLGNTDKSHIKKNLLGALLFDSGNTAEDRRLKRTARRRYTRRRNRILYLQEIFSEEMGKVDDSFFHRLDESFLTDDDKNFDSHPIFGNKAEEDAYHQKFPTIYHLRKHLADSTEKADLRLVYLALAHMIKFRGHFLIEGELNAENTDVQKLFADFVGVYDRTFDDSHLSEITVDASSILTEKISKSRRLEKLINNYPKEKKNTLFGNLIALSLGLQPNFKTNFKLSEDAKLQFSKDTYEEELEVLLAQIGDNYAELFLSAKKLYDSILLSGILTVTDVSTKAPLSASMIQRYNEHQMDLAQLKQFIRQKLSDKYNEVFSDVSKDGYAGYIDGKTNQEAFYKYLKGLLNKIEGSGYFLDKIEREDFLRKQRTFDNGSIPHQIHLQEMRAIIRRQAEFYPFLADNQDRIEKILTFRIPYYVGPLARGKSDFAWLSRKSADKITPWNFDEIVDKESSVEAFINRMTNYDLYLPNQKVLPKHSLLYEKFTVYNELTKVKYKTEQGKTAFFDANMKQEIFDGVFKVYRKVTKDKLMDFLEKEFDEFRIVDLTGLDKENKAFNASYGTYHDLRKILDKDFLDNSKNEKILEDIVLTLTLFEDREMIRKRLKNYSDLLTKEQLKKLERRHYTGWGRLSAELIHGIRNKESRKTILDYLIDDGNSNRNFMQLINDDALSFKEEIAKAQVIGETDNLNQVVSDIAGSPAIKKGILQSLKIVDELVKIMGHQPENIVVEMARENQFTNQGRRNSQQRLKGLTDSIKEFGSQILKEHPVENSQLQNDRLFLYYLQNGRDMYTGEELDIDYLSQYDIDHIIPQAFIKDNSIDNRVLTSSKENRGKSDDVPSKDVVRKMKSYWSKLLSAKLITQRKFDNLTKGERGGLTDDDKAGFIKRQLVETRQITKHVARILDERFNTETDENNKKIRQVKIVTLKSNLVSNFRKEFELYKVREINDYHHAHDAYLNAVIGKALLGVYPQLEPEFVYGDYPHFHGHKENKATAKKFFYSNIMNFFKKDDVRTDKNGEIIWKKDEYISNIKKVLSYPQVNIVKKVEEQTGGFSKESILPKGDSDKLIPRKTKKFYWDTKKYGGFDSPIVAYSILVIADIEKGKSKKLKTVKALVGVTIMEKMTFERDPVAFLERKGYRNVQEENIIKLPKYSLFKLENGRKRLLASARELQKGNEIVLPNHLGTLLYHAKNIHKVDEPKHLDYVDKHKDEFKELLDVVSNFSKKYTLAEGNLEKIKELYAQNNGEDLKELASSFINLLTFTAIGAPATFKFFDKNIDRKRYTSTTEILNATLIHQSITGLYETRIDLSKLGGD

SEQ ID NO: 700 - protein, 1345 aa, Streptococcus mutans
MKKPYSIGLDIGTNSVGWAVVTDDYKVPAKKMKVLGNTDKSHIKKNLLGALLFDSGNTAEDRRLKRTARRRYTRRRNRILYLQEIFSEEMGKVDDSFFHRLDESFLTDDDKNFDSYPIFGNKAEEDAYHQKFPTIYHLRKHLADSTEKADLRLVYLALAHMIKFRGHFLIEGELNAENTDVQKLFADFVGVYDRTFDDSHLSEITVDASSILTEKISKSRRLEKLINNYPKEKKNTLFRNLVALSLGLQPNFKTNFKLSEDAKLQFSKDTYEEDLEELLGKIGDDYADLFTLAKNLYDAILLSGILTADDSSTKAPLSASMIKRYAEHHEDLEKLKEFIKANKPELYHDIFKDETKNGYAGYIENGVKQDEFYKYLKNTLSKIAGSDYFLDKIEREDFLRKQRTFDNGSIPHQIHLQEMHAILRRQGDYYPFLKENQDRIEKILTFRIPYYVGPLARGKSDFAWLSRKSADKITPWNFDEIVDKESSVEAFINRMTNYDLYLPNQKVLPKHSLLYEKFTVYNELTKVKYKTEQGKTAFFDANMKQEIFDGVFKVYRKVTKDKLMDFLEKEFDEFRIVDLTGLDKENKAFNASYGTYHDLRKILDKDFLDNSKNEKILEDIVLTLTLFEDREMIRKRLKNYSDLLTKEQLKKLERRHYTGWGRLSAELIHGIRNKESRKTILDYLIDDGNSNRNFMQLINDDALSFKEEIAKAQVIGETDNLNQVVSDIAGSPAIKKGILQSLKIVDELVKIMGHQPENIVVEMARENQFTNQGRRNSQQRLKGLTDSIKEFGSQILKEHPVENSQLQNDRLFLYYLQNGRDMYTGEELDIDYLSQYDIDHIIPQAFIKDNSIDNRVLTSSKENRGKSDDVPSKDVVRKMKSYWSKLLSAKLITQRKFDNLTKGERGGLTDDDKAGFIKRQLVETRQITKHVARILDERFNTETDENNKKIRQVKIVTLKSNLVSNFRKEFELYKVREINDYHHAHDAYLNAVIGKALLGVYPQLEPEFVYGDYPHFHGHKENKATAKKFFYSNIMNFFKKDDVRTDKNGEIIWKKDEYISNIKKVLSYPQVNIVKKVEEQTGGFSKESILPKGDSDKLIPRKTKKFYWDTKKYGGFDSPIVAYSILVIADIEKGKSKKLKTVKALVGVTIMEKMTFERDPVAFLERKGYRNVQEENIIKLPKYSLFKLENGRKRLLASARELQKGNEIVLPNHLGTLLYHAKNIHKVDEPKHLDYVDKHKDEFKELLDVVSNFSKKYTLAEGNLEKIKELYAQNNGEDLKELASSFINLLTFTAIGAPATFKFFDKNIDRKRYTSTTEILNATLIHQSITGLYETRIDLSKLGGD

SEQ ID NO: 701 - protein, 1345 aa, Streptococcus mutans; identical to SEQ ID NO: 700

SEQ ID NO: 702 - protein, 1345 aa, Streptococcus mutans
MKKPYSIGLDIGTNSVGWAVVTDDYKVPAKKMKVLGNTDKSHIKKNLLGALLFDSGNTAEDRRLKRTARRRYTRRRNRILYLQEIFSEEMGKVDDSFFHRLEDSFLVTEDKRGERHPIFGNLEEEVKYHENFPTIYHLRQYLADNPEKTDLRLVYLALAHIIKFGGHFLIEGKFDTRNNDVQRLFQEFLAVYDNTFENSSLQEQNVQVEEILTDKISKSAKKDRVLKLFPNEKSNGRFAEFLKLIVGNQADFKKHFELEEKAPLQFSKDIYEEELEVLLAQIGDNYAELFLSAKKLYDSILLSGILTVTDVSTKAPLSASMIQRYNEHQMDLAQLKQFIRQKLSDKYNEVFSDVSKDGYAGYIDGKTNQEAFYKYLKGLLNKIEGSGYFLDKIEREDFLRKQRTFDNGSIPHQIHLQEMRAIIRRQAEFYPFLADNQDRIEKILTFRIPYYVGPLARGKSDFAWLSRKSADKITPWNFDEIVDKESSVEAFINRMTNYDLYLPNQKVLPKHSLLYEKFTVYNELTKVKYKTEQGKTAFFDANMKQEIFDGVFKVYRKVTKDKLMDFLEKEFDEFRIVDLTGLDKENKAFNASYGTYHDLRKILDKDFLDNSKNEKILEDIVLTLTLFEDREMIRKRLKNYSDLLTKEQLKKLERRHYTGWGRLSAELIHGIRNKESRKTILDYLIDDGNSNRNFMQLINDDALSFKEEIAKAQVIGETDNLNQVVSDIAGSPAIKKGILQSLKIVDELVKIMGHQPENIVVEMARENQFTNQGRRNSQQRLKGLTDSIKEFGSQILKEHPVENSQLQNDRLFLYYLQNGRDMYTGEELDIDYLSQYDIDHIIPQAFIKDNSIDNRVLTSSKENRGKSDDVPSKNVVRKMKSYWSKLLSAKLITQRKFDNLTKAERGGLTDDDKAGFIKRQLVETRQITKHVARILDERFHTETDENNKKIRQVKIVTLKSNLVSNFRKEFELYKVREINDYHHAHDAYLNAVIGKALLGVYPQLEPEFVYGDYPHFHGHKENKATAKKFFYSNIMNFFKKDDVRTDKNGEIIWKKDEHISNIKKVLSYPQVNIVKKVEEQTGGFSKESILPKGNSDKLIPRKTKKFYWDTKKYGGFDSPIVAYSILVIADIEKGKSKKLKTVKALVGVTIMEKMTFERDPVAFLERKGYRNVQEENIIKLPKYSLFKLENGRKRLLASARELQKGNEIVLPNHLGTLLYHAKNIHKVDEPKHLDYVDKHKDEFKELLDVVSNFSKKYTLAEGNLEKIKELYAQNNGEDLKELASSFINLLTFTAIGAPATFKFFDKNIDRKRYTSTTEILNATLIHQSITGLYETRIDLSKLGGD

SEQ ID NO: 703 - protein, 1345 aa, Streptococcus mutans; identical to SEQ ID NO: 702

SEQ ID NO: 704 - protein, 1345 aa, Streptococcus mutans
MKKPYSIGLDIGTNSVGWAVVTDDYKVPAKKMKVLGNTDKSHIKKNLLGALLFDSGNTAEDRRLKRTARRRYTRRRNRILYLQEIFSEEMGKVDDSFFHRLEDSFLVTEDKRGERHPIFGNLEEEVKYHENFPTIYHLRQYLADNPEKTDLRLVYLALAHIIKFRGHFLIEGKFDTRNNDVQRLFQEFLAVYDNTFENSSLQEQNVQVEEILTDKISKSAKKDRVLKLFPNEKSNGRFAEFLKLIVGNQADFKKHFELEEKAPLQFSKDIYEEELEVLLAQIGDNYAELFLSAKKLYDSILLSGILTVTDVSTKAPLSASMIQRYNEHQMDLAQLKQFIRQKLSDKYNEVFSDVSKDGYAGYIDGKTNQEAFYKYLKGLLNKIEGSGYFLDKIEREDFLRKQRTFDNGSIPHQIHLQEMRAIIRRQAEFYPFLADNQDRIEKILTFRIPYYVGPLARGKSDFAWLSRKSADKITPWNFDEIVDKESSVEAFINRMTNYDLYLPNQKVLPKHSLLYEKFTVYNELTKVKYKTEQGKTAFFDANMKQEIFDGVFKVYRKVTKDKLMDFLEKEFDEFRIVDLTGLDKENKAFNASYGTYHDLRKILDKDFLDNSKNEKILEDIVLTLTLFEDREMIRKRLKNYSDLLTKEQLKKLERRHYTGWGRLSAELIHGIRNKESRKTILDYLIDDGNSNRNFMQLINDDALSFKEEIAKAQVIGETDNLNQVVSDIAGSPAIKKGILQSLKIVDELVKIMGHQPENIVVEMARENQFTNQGRRNSQQRLKGLTDSIKEFGSQILKEHPVENSQLQNDRLFLYYLQNGRDMYTGEELDIDYLSQYDIDHIIPQAFIKDNSIDNRVLTSSKENRGKSDDVPSKNVVRKMKSYWSKLLSAKLITQRKFDNLTKAERGGLTDDDKAGFIKRQLVETRQITKHVARILDERFHTETDENNKKIRQVKIVTLKSNLVSNFRKEFELYKVREINDYHHAHDAYLNAVIGKALLGVYPQLEPEFVYGDYPHFHGHKENKATAKKFFYSNIMNFFKKDDVRTDKNGEIIWKKDEHISNIKKVLSYPQVNIVKKVEEQTGGFSKESILPKGNSDKLIPRKTKKFYWDTKKYGGFDSPIVAYSILVIADIEKGKSKKLKTVKALVGVTIMEKMTFERDPVAFLERKGYRNVQEENIIKLPKYSLFKLENGRKRLLASARELQKGNEIVLPNHLGTLLYHAKNIHKVDEPKHLDYVDKHKDEFKELLDVVSNFSKKYTLAEGNLEKIKELYAQNNGEDLKELASSFINLLTFTAIGAPATFKFFDKNIDRKRYTSTTEILNATLIHQSITGLYETRIDLSKLGGD

SEQ ID NO: 705 - protein, 1345 aa, Streptococcus mutans
MKKPYSIGLDIGTNSVGWAVVTDDYKVPAKKMKVLGNTDKSHIKKNLLGALLFDSGNTAEDRRLKRTARRRYTRRRNRILYLQEIFSEEMGKVDDSFFHRLEDSFLVTEDKRGERHPIFGNLEEEVKYHENFPTIYHLRQYLADNPEKTDLRLVYLALAHIIKFRGHFLIEGKFDTRNNDVQRLFQEFLAVYDNTFENSSLQEQNVQVEEILTDKISKSAKKDRVLKLFPNEKSNGRFAEFLKLIVGNQADFKKHFELEEKAPLQFSKDIYEEELEVLLAQIGDNYAELFLSAKKLYDSILLSGILTVTDVSTKAPLSASMIQRYNEHQMDLAQLKQFIRQKLSDKYNEVFSDVSKDGYAGYIDGKTNQEAFYKYLKGLLNKIEGSGYFLDKIEREDFLRKQRTFDNGSIPHQIHLQEMRAIIRRQAEFYPFLADNQDRIEKILTFRIPYYVGPLARGKSDFAWLSRKSADKITPWNFDEIVDKESSVEAFINRMTNYDLYLPNQKVLPKHSLLYEKFTVYNELTKVKYKTEQGKTAFFDANMKQEIFDGVFKVYRKVTKDKLMDFLEKEFDEFRIVDLTGLDKENKAFNASYGTYHDLRKILDKDFLDNSKNEKILEDIVLTLTLFEDREMIRKRLKNYSDLLTKEQLKKLERRHYTGWGRLSAELIHGIRNKESRKTILDYLIDDGNSNRNFMQLINDDALSFKEEIAKAQVIGETDNLNQVVSDIAGSPAIKKGILQSLKIVDELVKIMGHQPENIVVEMARENQFTNQGRRNSQQRLKGLTDSIKEFGSQILKEHPVENSQLQNDRLFLYYLQNGRDMYTGEELDIDYLSQYDIDHIIPQAFIKDNSIDNRVLTSSKENRGKSDDVPSKDVVRKMKSYWSKLLSAKLITQRKFDNLTKAERGGLTDDDKAGFIKRQLVETRQITKHVARILDERFNTETDENNKKIRQVKIVTLKSNLVSNFRKEFELYKVREINDYHHAHDAYLNAVIGKALLGVYPQLEPEFVYGDYPHFHGHKENKATAKKFFYSNIMNFFKKDDVRTDKNGEIIWKKDEHISNIKKVLSYPQVNIVKKVEEQTGGFSKESILPKGNSYKLIPRKTKKFYWDTKKYGGFDSPIVAYSILVIADIEKGKSKKLKTVKALVGVTIMEKMTFERDPVAFLERKGYRNVQEENIIKLPKYSLFKLENGRKRLLASARELQKGNEIVLPNHLGTLLYHAKNIHKVDEPKHLDYVDKHKDEFKELLDVVSNFSKKYTLAEGNLEKIKELYAQNNGEDLKELASSFINLLTFTAIGAPAAFKFFDKNIDRKRYTSTTEILNATLIHQSITGLYETRIDLSKLGGD

SEQ ID NO: 706 - protein, 1345 aa, Streptococcus mutans
MKKPYSIGLDIGTNSVGWAVVTDDYKVPAKKMKVLGNTDKSHIKKNLLGALLFDSGNTAEDRRLKRTARRRYTRRRNRILYLQEIFSEEMGKVDDSFFHRLEDSFLVTEDKRGERHPIFGNLEEEVKYHENFPTIYHLRQYLADNPEKTDLRLVYLALAHIIKFRGHFLIEGKFDTRNNDVQRLFQEFLAVYDNTFENSSLQEQNVQVEEILTDKISKSAKKDRVLKLFPNEKSNGRFAEFLKLIVGNQADFKKHFELEEKAPLQFSKDIYEEELEVLLAQIGDNYAELFLSAKKLYDSILLSGILTVTDVSTKAPLSASMIQRYNEHQMDLAQLKQFIRQKLSDKYNEVFSDVSKDGYAGYIDGKTNQEAFYKYLKGLLNKIEGSGYFLDKIEREDFLRKQRTFDNGSIPHQIHLQEMRAIIRRQAEFYPFLADNQDRIEKILTFRIPYYVGPLARGKSDFAWLSRKSADKITPWNFDEIVDKESSAEAFINRMTNYDLYLPNQKVLPKHSLLYEKFTVYNELTKVKYKTEQGKTAFFDANMKQEIFDGVFKVYRKVTKDKLMDFLEKEFDEFRIVDLTGLDKENKAFNASYGTYHDLRKILDKDFLDNSKNEKILEDIVLTLTLFEDREMIRKRLKNYSDLLTKEQLKKLERRHYTGWGRLSAELIHGIRNKESRKTILDYLIDDGNSNRNFMQLINDDALSFKEEIAKAQVIGETDNLNQVVSDIAGSLAIKKGILQSLKIVDELVKIMGHQPENIVVEMARENQFTNQGRRNSQQRLKGLTDSIKEFGSQILKEHPVENSQLQNDRLFLYYLQNGRDMYTGEELDIDYLSQYDIDHIIPQAFIKDNSIDNRVLTSSKENRGKSDDVPSKDVVRKMKSYWSKLLSAKLITQRKFDNLTKGERGGLTDDDKAGFIKRQLVETRQITKHVARILDERFNTETDENNKKIRQVKIVTLKSNLVSNFRKEFELYKVREINDYHHAHDAYLNAVIGKALLGVYPQLEPEFVYGDYPHFHGHKENKATAKKFFYSNIMNFFKKDDVRTDKNGEIIWKKDEYISNIKKVLSYPQVNIVKKVEEQTGGFFKESILPKGDSDKLIPRKTKKFYWDTKKYGGFDSPIVAYSILVIADIEKGKSKKLKTVKALVGVTIMEKMTFERDPVAFLERKGYRNVQEENIIKLPKYSLFKLENGRKRLLASARELQKGNEIVLPNHLGTLLYHAKNIHKVDEPKHLDYVDKHKDEFKELLDVVSNFSKKYTLAEGNLEKIKELYAQNNGEDLKELASSFINLLTFTAIGAPATFKFFDKNIDRKRYTSTTEILNATLIHQSITGLYETRIDLSKLGGD

SEQ ID NO: 707 - protein, 1345 aa, Streptococcus mutans
MKKPYSIGLDIGTNSVGWAVVTDDYKVPAKKMKVLGNTDKSHIKKNLLGALLFDSGNTAEDRRLKRTARRRYTRRRNRILYLQEIFSEEMGKVDDSFFHRLEDSFLVTEDKRGERHPIFGNLEEEVKYHENFPTIYHLRQYLADNPEKTDLRLVYLALAHIIKFRGHFLIEGKFDTRNNDVQRLFQEFLAVYDNTFENSSLQEQNVQVEEILTDKISKSAKKDRVLKLFPNEKSNGRFAEFLKLIVGNQADFKKHFELEEKAPLQFSKDIYEEELEVLLAQIGDNYAELFLSAKKLYDSILLSGILTVTDVSTKAPLSASMIQRYNEHQMDLAQLKQFIRQKLSDKYNEVFSDVSKDGYAGYIDGKTNQEAFYKYLKGLLNKIEGSGYFLDKIEREDFLRKQRTFDNGSIPHQIHLQEMRAIIRRQAEFYPFLADNQDRIEKILTFRIPYYVGPLARGKSDFAWLSRKSADKITPWNFDEIVDKESSVEAFINRMTNYDLYLPNQKVLPKHSLLYEKFTVYNELTKVKYKTEQGKTAFFDANMKQEIFDGVFKVYRKVTKDKLMDFLEKEFDEFRIVDLTGLDKENKAFNASYGTYHDLRKILDKDFLDNSKNEKILEDIVLTLTLFEDREMIRKRLKNYSDLLTKEQLKKLERRHYTGWGRLSAELIHGIRNKESRKTILDYLIDDGNSNRNFMQLINDDALSFKEEIAKAQVIGETDNLNQVVSDIAGSPAIKKGILQSLKIVDELVKIMGHQPENIVVEMARENQFTNQGRRNSQQRLKGLTDSIKEFGSQILKEHPVENSQLQNDRLFLYYLQNGRDMYTGEELDIDYLSQYDIDHIIPQAFIKDNSIDNRVLTSSKENRGKSDDVPSKDVVRKMKSYWSKLLSAKLITQRKFDNLTKAERGGLTDDDKAGFIKRQLVETRQITKHVARILDERFNTETDENNKKIRQVKIVTLKSNLVSNFRKEFELYKVREINDYHHAHDAYLNAVIGKALLGVYPQLEPEFVYGDYPHFHGHKENKATAKKFFYSNIMNFFKKDDVRTDKNGEIIWKKDEHISNIKKVLSYPQVNIVKKVEEQTGGFSKESILPKGNSDKLIPRKTKKFYWDTKKYGGFDSPIVAYSILVIADIEKGKSKKLKTVKALVGVTIMEKMTFERDPVAFLERKGYRNVQEENIIKLPKYSLFKLENGRKRLLASARELQKGNEIVLPNHLGTLLYHAKNIHKVDEPKHLDYVDKHKDEFKELLDVVSNFSKKYTLAEGNLEKIKELYAQNNGEDLKELASSFINLLTFTAIGAPATFKFFDKNIDRKRYTSTTEILNATLIHQSITGLYETRIDLNKLGGD

SEQ ID NO: 708 - protein, 1345 aa, Streptococcus mutans; identical to SEQ ID NO: 707

SEQ ID NO: 709 - protein, 1345 aa, Streptococcus mutans; identical to SEQ ID NO: 704

SEQ ID NO: 710 - protein, 1345 aa, Streptococcus mutans; identical to SEQ ID NO: 705

SEQ ID NO: 711 - protein, 1345 aa, Streptococcus mutans; identical to SEQ ID NO: 706

SEQ ID NO: 712 - protein, 1345 aa, Streptococcus mutans
MKKPYSIGLDIGTNSVGWAVVTDDYKVPAKKMKVLGNTDKSHIKKNLLGALLFDSGNTAEDRRLKRTARRRYTRRRNRILYLQEIFSEEMGKVDDSFFHRLEDSFLVTEDKRGERHPIFGNLEEEVKYHENFPTIYHLRQYLADNPEKVDLRLVYLALAHIIKFRGHFLIEGKFDTRNNDVQKLFQEFLAVYDNTFENSSLQEQNVQVEEILTDKISKSAKKDRVLKLFPNEKSNGRFAEFLKLIVGNQADFKKHFELEEKAPLQLSKDTYEEELEVLLAQIGDNYAELFLSAKKLYDSILLSGILTVTDVSTKAPLSASMIQRYNEHQMDLAQLKQFIRQKLSDKYNEVFSDVSKDGYAGYIDGKTNQEAFYKYLKGLLNKIEGSGYFLDKIEREDFLRKQRTFDNGSIPHQIHLQEMRAIIRRQAEFYPFLADNQDRIEKILTFRIPYYVGPLARGKSDFAWLSRKSADKITPWNFDEIVDKESSVEAFINRMTNYDLYLPNQKVLPKHSLLYEKFTVYNELTKVKYKTEQGKTAFFDANMKQEIFDGVFKVYRKVTKDKLMDFLEKEFDEFRIVDLTGLDKENKAFNASYGTYHDLRKILDKDFLDNSKNEKILEDIVLTLTLFEDREMIRKRLENYSDLLTKEQVKKLERRHYTGWGRLSAELIHGIRNKESRKTLLDYLIDDGNSNRNFMQLINDDALSFKEEIAKAQVIGETDNLNQVVSDIAGSPAIKKGILQSLKIVDELVKIMGHQPENIVVEMARENQFTNQGRRNSQQRLKGLTDSIKEFGSQILKEHPVENSQLQNDRLFLYYLQNGRDMYTGEELDIDYLSQYDIDHIIPQAFIKDNSIDNRVLTSSKENRGKSDDVPSKDVVRKMKSYWSKLLSAKLITQRKFDNLTKAERGGLTDDDKAGFIKRQLVETRQITKHVARILDERFNTETDENNKKIRQVKIVTLKSNLVSNFRKEFELYKVREINDYHHAHDAYLNAVIGKALLGVYPQLEPEFVYGDYPHFHGHKENKATAKKFFYSNIMNFFKKDDVRTDKNGEIIWKKDEYISNIKKVLSYPQVNIVKKVEEQTGGFSKESILPKGNSDKLIPRKTKKFYWDTKKYGGFDSPIVAYSILVIADIEKGKSKKLKTVKALVGVTIMEKMTFERDPIAFLERKGYRNVQEENIIKLPKYSLFKLENGRKRLLASARELQKGNEIVLPNHLGTLLYHAKNIHKVDEPKHLDYVDKHKDEFKELLDVVSNFSKKYTLAEGNLEKIKELYAQNNGEDLKELASSFINLLTFTAIGAPATFKFFDKNIDRKRYTSTTEILNATLIHQSITGLYETRIDLSKLGGD

SEQ ID NO: 713 - protein, 1345 aa, Streptococcus mutans; identical to SEQ ID NO: 712

SEQ ID NO: 714 - protein, 1345 aa, Streptococcus mutans
MKKPYSIGLDIGTNSVGWAVVTDDYKVPAKKMKVLGNTDKSHIKKNLLGALLFDSGNTAEDRRLKRTARRRYTRRRNRILYLQEIFSEEMGKVDDSFFHRLEDSFLVTEDKRGERHPIFGNLEEEVKYHENFPTIYHLRQYLADNPEKVDLRLVYLALAHIIKFRGHFLIEGKFDTRNNDVQRLFQEFLAVYDNTFENSSLQEQNVQVEEILTDKISKSAKKDRVLKLFPNEKSNGRFAEFLKLIVGNQADFKKHFELEEKAPLQFSKDTYEEDLEELLGKIGDDYADLFTLAKNLYDAILLSGILTADDSSTKAPLSASMIQRYNEHQMDLAQLKQFIRQKLSDKYNEVFSDVSKDGYAGYIDGKTNQEAFYKYLKGLLNKIEGSGYFLDKIEREDFLRKQRTFDNGSIPHQIHLQEMRAIIRRQAEFYPFLADNQDRIEKILTFRIPYYVGPLARGKSDFAWLSRKSADKITPWNFDEIVDKESSAEAFINRMTNYDLYLPNQKVLPKHSLLYEKFTVYNELTKVKYKTEQGKTAFFDANMKQEIFDGVFKVYRKVTKDKLMDFLEKEFDEFRIVDLTGLDKENKVFNASYGTYHDLCKILDKDFLDNSKNEKILEDIVLTLTLFEDREMIRKRLENYSDLLTKEQVKKLERRHYTGWGRLSAELIHGIRNKESRKTILDYLIDDGNSNRNFMQLINDDALSFKEEIAKAQVIGETDNLNQVVSDIAGSPAIKKGILQSLKIVDELVKIMGHQPENIVVEMARENQFTNQGRRNSQQRLKGLTDSIKEFGSQILKEHPVENSQLQNDRLFLYYLQNGRDMYTGEELDIDYLSQYDIDHIIPQAFIKDNSIDNRVLTSSKENRGKSDDVPSKDVVRKMKSYWSKLLSAKLITQRKFDNLTKAERGGLTDDDKAGFIKRQLVETRQITKHVARILDERFYTETDENNKKIRQVKIVTLKSNLVSNFRKEFELYKVREINDYHHAHDAYLNAVIGKALLGVYPQLEPEFVYGDYPHFHGHKENKATAKKFFYSNIMNFFKKDDVRTDKNGEIIWKKDEHISNIKKVLSYPQVNIVKKVEEQTGGFSKESILPKGNSDKLIPRKTKKFYWDTKKYGGFDSPIVAYSILVIADIEKGKSKKLKTVKALVGVTIMEKMTFERDPVAFLERKGYRNVQEENIIKLPKYSLFKLENGRKRLLASARELQKGNEIVLPNHLGTLLYHAKNIHKVDEPKHLDYVDKHKDEFKELLDVVSNFSKKYTLAEGNLEKIKELYAQNNGEDLKELASSFINLLTFTAIGAPATFKFFDKNIDRKRYTSTTEILNATLIHQSITGLYETRIDLSKLGGD

SEQ ID NO: 715 - protein, 1345 aa, Streptococcus mutans
MKKPYSIGLDIGTNSVGWAVVTDDYKVPAKKMKVLGNTDKSHIKKNLLGALLFDSGNTAEDRRLKRTARRRYTRRRNRILYLQEIFSEEMGKVDDSFFHRLEDSFLVTEDKRGERHPIFGNLEEEVKYHENFPTIYHLRQYLADNPEKVDLRLVYLALAHIIKFRGHFLIEGKFDTRNNDVQRLFQEFLAVYDNTFENSSLQEQNVQVEEILTDKISKSAKKDRVLKLFPNEKSNGRFAEFLKLIVGNQADFKKHFELEEKAPLQFSKDTYEEDLEELLGKIGDDYADLFTLAKNLYDAILLSGILTADDSSTKAPLSASMIQRYNEHQMDLAQLKQFIRQKLSDKYNEVFSDVSKDGYAGYIDGKTNQEAFYKYLKGLLNKIEGSGYFLDKIEREDFLRKQRTFDNGSIPHQIHLQEMRAIIRRQAEFYPFLADNQDRIEKILTFRIPYYVGPLARGKSDFAWLSRKSADKITPWNFDEIVDKESSAEAFINRMTNYDLYLPNQKVLPKHSLLYEKFTVYNELTKVKYKTEQGKTAFFDANMKQEIFDGVFKVYRKVTKDKLMDFLEKEFDEFRIVDLTGLDKENKVFNASYGTYHDLCKILDKDFLDNSKNEKILEDIVLTLTLFEDREMIRKRLENYSDLLTKEQVKKLERRHYTGWGRLSAELIHGIRNKESRKTILDYLIDDGNSNRNFMQLINDDALSFKEEIAKAQVIGETDNLNQVVSDIAGSPAIKKGILQSLKIVDELVKIMGHQPENIVVEMARENQFTNQGRRNSQQRLKGLTDSIKEFGSQILKEHPVENSQLQNDRLFLYYLQNGRDMYTGEELDIDYLSQYDIDHIIPQAFIKDNSIDNRVLTSSKENRGKSDDVPSKDVVRKMKPYWSKLLSAKLITQRKFDNLTKAERGGLTDDDKAGFIKRQLVETRQITKHVARILDERFNTETDENNKKIRQVKIVTLKSNLVSNFRKEFELYKVREINDYHHAHDAYLNAVIGKALLGVYPQLEPEFVYGDYPHFHGHEENKATAKKFFYSNIMNFFKKDDVRTDKNGEIIWKKDEHISNIKKVLSYPQVNIVKKVEEQTGGFSKESILPKGNSDKLIPRKTKKFYWDTKKYGGFDSPIVAYSILVIADIEKGKSKKLKTVKALVGVTIMEKMTFERDPVAFLERKGYRNVQEENIIKLPKYSLFKLENGRKRLLASARELQKGNEIVLPNHLGTLLYHAKNIHKVDEPKHLDYVDKHKDEFKELLDVVSNFSKKYTLAEGNLEKIKELYAQNNGEDLKELASSFINLLTFTAIGAPATFKFFDKNIDRKRYTSTTEILNATLIHQSITGLYETRIDLSKLGGD

SEQ ID NO: 716 - protein, 1345 aa, Streptococcus mutans
MKKPYSIGLDIGTNSVGWAVVTDDYKVPAKKMKVLGNTDKSHIKKNLLGALLFDSGNTAEDRRLKRTARRRYTRRRNRILYLQEIFSEEMGKVDDSFFHRLEDSFLVTEDKRGERHPIFGNLEEEVKYHENFPTIYHLRQYLADNPEKVDLRLVYLALAHIIKFRGHFLIEGKFDTRNNDVQRLFQEFLAVYDNTFENSSLQEQNVQVEEILTDKISKSAKKDRVLKLFPNEKSNGRFAEFLKLIVGNQADFKKHFELEEKAPLQFSKDTYEEELEVLLAQIGDNYAELFLSAKKLYDSILLSGILTVTDVSTKAPLSASMIQRYNEHQMDLAQLKQFIRQKLSDKYNEVFSDVSKDGYAGYIDGKTNQEAFYKYLKGLLNKIEGSGYFLDKIEREDFLRKQRTFDNGSIPHQIHLQEMRAIIRRQAEFYPFLADNQDRIEKILTFRIPYYVGPLARGKSDFAWLSRKSADKITPWNFDEIVDKESSAEAFINRMTNYDLYLPNQKVLPKHSLLYEKFTVYNELTKVKYKTEQGKTAFFDANMKQEIFDGVFKVYRKVTKDKLMDFLEKEFDEFRIVDLTGLDKENKVFNASYGTYHDLCKILDKDFLDNSKNEKILEDIVLTLTLFEDREMIRKRLENYSDLLTKEQVKKLERRHYTGWGRLSAELIHGIRNKESRKTILDYLIDDGNSNRNFMQLINDDALSFKEEIAKAQVIGETDNLNQVVSDIAGSPAIKKGILQSLKIVDELVKIMGHQPENIVVEMARENQFTKQGRRNSQQRLKGLTDSIKEFGSQILKEHPVENSQLQNDRLFLYYLQNGRDMYTGEELDIDYLSQYDIDHIIPQAFIKDNSIDNRVLTSSKENRGKSDDVPSKDVVRKMKSYWSKLLSAKLITQRKFDNLTKAERGGLTDDDKAGFIKRQLVETRQITKHVARILDERFYTETDENNKKIRQVKIVTLKSNLVSNFRKEFELYKVREINDYHHAHDAYLNAVIGKALLGVYPQLEPEFVYGDYPHFHGHKENKATAKKFFYSNIMNFFKKDDVRTDKNGEIIWKKDEHISNIKKVLSYPQVNIVKKVEEQTGGFSKESILPKGNSDKLIPRKTKKFYWDTKKYGGFDSPIVAYSILVIADIEKGKSKKLKTVKALVGVTIMEKMTFERDPVAFLERKGYRNVQEENIIKLPKYSLFKLENGRKRLLASARELQKGNEIVLPNHLGTLLYHAKNIHKVDEPKHLDYVDKHKDEFKELLDVVSNFSKKYTLAEGNLEKIKELYAQNNGEDLKELASSFINLLTFTAIGAPATFKFFDKNIDRKRYTSTTEILNATLIHQSITGLYETRIDLSKLGGD

SEQ ID NO: 717 - protein, 1345 aa, Streptococcus mutans
MKKPYSIGLDIGTNSVGWAVVTDDYKVPAKKMKVLGNTDKSHIKKNLLGALLFDSGNTAEDRRLKRTARRRYTRRRNRILYLQEIFSEEMGKVDDSFFHRLEDSFLVTEDKRGERHPIFGNLEEEVKYHENFPTIYHLRQYLADNPEKVDLRLVYLALAHIIKFRGHFLIEGKFDTRNNDVQRLFQEFLAVYDNTFENSSLQEQNVQVEEILTDKISKSAKKDRVLKLFPNEKSNGRFAEFLKLIVGNQADFKKHFELEEKAPLQFSKDTYEEELEVLLAQIGDNYAELFLSAKKLYDSILLSGILTVTDVSTKAPLSASMIQRYNEHQMDLAQLKQFIRQKLSDKYNEVFSDVSKDGYAGYIDGKTNQEAFYKYLKGLLNKIEGSGYFLDKIEREDFLRKQRTFDNGSIPHQIHLQEMRAIIRRQAEFYPFLADNQDRIEKILTFRIPYYVGPLARGKSDFAWLSRKSADKITPWNFDEIVDKESSAEAFINRMTNYDLYLPNQKVLPKHSLLYEKFTVYNELTKVKYKTEQGKTAFFDANMKQEIFDGVFKVYRKVTKDKLMDFLEKEFDEFRIVDLTGLDKENKVFNASYGTYHDLCKILDKDFLDNSKNEKILEDIVLTLTLFEDREMIRKRLENYSDLLTKEQVKKLERRHYTGWGRLSAELIHGIRNKESRKTILDYLIDDGNSNRNFMQLINDDALSFKEEIAKAQVIGETDNLNQVVSDIAGSPAIKKGILQSLKIVDELVKIMGHQPENIVVEMARENQFTKQGRRNSQQRLKGLTDSIKEFGSQILKEHPVENSQLQNDRLFLYYLQNGRDMYTGEELDIDYLSQYDIDHIIPQAFIKDNSIDNRVLTSSKENRGKSDDVPSKDVVRKMKSYWSKLLSAKLITQRKFDNLTKAERGGLTDDDKAGFIKRQLVETRQITKHVARILDERFYTETDENNKKIRQVKIVTLKSNLVSNFRKEFELYKVREINDYHHAHDAYLNAVIGKALLGVYPQLEPEFVYGDYPHFHGHKENKATAKKFFYSNIMNFFKKDDVRTDRNGEIIWKKDEHISNIKKVLSYPQVNIVKKVEEQTGGFSKESILPKGNSDKLIPRKTKKFYWDTKKYGGFDSPIVAYSILVIADIEKGKSKKLKTVKALVGVTIMEKMTFERDPVAFLERKGYRNVQEENIIKLPKYSLFKLENGRKRLLASARELQKGNEIVLPNHLGTLLYHAKNIHKVDEPKHLDYVDKHKDEFKELLDVVSNFSKKYTLAEGNLEKIKELYAQNNGEDLKELASSFINLLTFTAIGAPATFKFFDKNIDRKRYTSTTEILNATLIHQSITGLYETRIDLSKLGGD

SEQ ID NO: 718 - protein, 1345 aa, Streptococcus mutans
MKKPYSIGLDIGTNSVGWAVVTDDYKVPAKKMKVLGNTDKSHIKKNLLGALLFDSGNTAEDRRLKRTARRRYTRRRNRILYLQEIFSEEMGKVDDSFFHRLEDSFLVTEDKRGERHPIFGNLEEEVKYHENFPTIYHLRQYLADNPEKVDLRLVYLALAHIIKFRGHFLIEGKFDTRNNDVQRLFQEFLAVYDNTFENSSLQEQNVQVEEILTDKISKSAKKDRVLKLFPNEKSNGRFAEFLKLIVGNQADFKKHFELEEKAPLQFSKDTYEEELEVLLAQIGDNYAELFLSAKKLYDSILLSGILTVTDVSTKAPLSASMIQRYNEHQMDLAQLKQFIRQKLSDKYNEVFSDVSKDGYAGYIDGKTNQEAFYKYLKGLLNKIEGSGYFLDKIEREDFLRKQRTFDNGSIPHQIHLQEMRAIIRRQAEFYPFLADNQDRIEKILTFRIPYYVGPLARGKSDFAWLSRKSADKITPWNFDEIVDKESSAEAFINRMTNYDLYLPNQKVLPKHSLLYEKFTVYNELTKVKYKTEQGKTAFFDANMKQEIFDGVFKVYRKVTKDKLMDFLEKEFDEFRIVDLTGLDKENKVFNASYGTYHDLCKILDKDFLDNSKNEKILEDIVLTLTLFEDREMIRKRLENYSDLLTKEQVKKLERRHYTGWGRLSAELIHGIRNKESRKTILDYLIDDGNSNRNFMQLINDDALSFKEEIAKAQVIGETDNLNQVVSDIAGSPAIKKGILQSLKIVDELVKIMGHQPENIVVEMARENQFTNQGRQNSQQRLKGLTDSIKEFGSQILKEHPVENSQLQNDRLFLYYLQNGRDMYTGEELDIDYLSQYDIDHIIPQAFIKDNSIDNRVLTSSKENRGKSDDVPSEDVVRKMKSYWSKLLSAKLITQRKFDNLTKAERGGLTDDDKAGFIKRQLVETRQITKHVARILDERFYTETDENNKKIRQVKIVTLKSNLVSNFRKEFELYKVREINDYHHAHDAYLNAVIGKALLGVYPQLEPEFVYGDYPHFHGHKENKATAKKFFYSNIMNFFKKDDVRTDKNGEIIWKKDEHISNIKKVLSYPQVNIVKKVEEQTGGFSKESILPKGNSDKLIPRKTKKFYWDTKKYGGFDSPIVAYSILVIADIEKGKSKKLKTVKALVGVTIMEKMTFERDPVAFLERKGYRNVQEENIIKLPKYSLFKLENGRKRLLASARELQKGNEIVLPNHLGTLLYHAKNIHKVDEPKHLDYVDKHKDEFKELLDVVSNFSKKYTLAEGNLEKIKELYAQNNGEDLKELASSFINLLTFTAIGAPATFKFFDKNIDRKRYTSTTEILNATLIHQSITGLYETRIDLSKLGGD

SEQ ID NO: 719 - protein, 1345 aa, Streptococcus mutans; identical to SEQ ID NO: 718

SEQ ID NO: 720 - protein, 1345 aa, Streptococcus mutans; identical to SEQ ID NO: 714

SEQ ID NO: 721 - protein, 1345 aa, Streptococcus mutans; identical to SEQ ID NO: 715

SEQ ID NO: 722 - protein, 1345 aa, Streptococcus mutans; identical to SEQ ID NO: 716

SEQ ID NO: 723 - protein, 1345 aa, Streptococcus mutans; identical to SEQ ID NO: 717

SEQ ID NO: 724 - protein, 1345 aa, Streptococcus mutans; identical to SEQ ID NO: 716

SEQ ID NO: 725 - protein, 1345 aa, Streptococcus mutans; identical to SEQ ID NO: 716

SEQ ID NO: 726 - protein, 1345 aa, Streptococcus mutans; identical to SEQ ID NO: 716

SEQ ID NO: 727 - protein, 1345 aa, Streptococcus mutans; identical to SEQ ID NO: 717

SEQ ID NO: 728 - protein, 1345 aa, Streptococcus mutans
MKKPYSIGLDIGTNSVGWAVVTDDYKVPAKKMKVLGNTDKSHIKKNLLGALLFDSGNTAEDRRLKRTARRRYTRRRNRILYLQEIFSEEMGKVNDSFFHRLEDSFLVTEDKRGERHPIFGNLEEEVKYHENFPTIYHLRQYLADNPEKVDLRLVYLALAHIIKFRGHFLIEGKFDTRNNDVQRLFQEFLAVYDNTFENSSLQEQNVQVEEILTDKISKSAKKDRVLKLFPNEKSNGRFAEFLKLIVGNQADFKKHFELEEKAPLQFSKDTYEEELEVLLAQIGDNYAELFLSAKKLYDSILLSGILTVTDVSTKAPLSASMIQRYNEHQMDLAQLKQFIRQKLSDKYNEVFSDVSKDGYAGYIDGKTNQEAFYKYLKGLLNKIEGSGYFLDKIEREDFLRKQRTFDNGSIPHQIHLQEMRAIIRRQAEFYPFLADNQDRIEKILTFRIPYYVGPLARGKSDFAWLSRKSADKITPWNFDEIVDKESSAEAFINRMTNYDLYLPNQKVLPKHSLLYEKFTVYNELTKVKYKTEQGKTAFFDANMKQEIFDGVFKVYRKVTKDKLMDFLEKEFDEFRIVDLTGLDKENKVFNASYGTYHDLCKILDKDFLDNSKNEKILEDIVLTLTLFEDREMIRKRLENYSDLLTKEQVKKLERRHYTGWGRLSAELIHGIRNKESRKTILDYLIDDGNSNRNFMQLINDDALSFKEEIAKAQVIGETDNLNQVVSDIAGSPAIKKGILQSLKIVDELVKIMGHQPENIVVEMARENQFTKQGRRNSQQRLKGLTDSIKEFGSQILKEHPVENSQLQNDRLFLYYLQNGRDMYTGEELDIDYLSQYDIDHIIPQAFIKDNSIDNRVLTSSKENRGKSDDVPSKDVVRKMKSYWSKLLSAKLITQRKFDNLTKAERGGLTDDDKAGFIKRQLVETRQITKHVARILDERFYTETDENNKKIRQVKIVTLKSNLVSNFRKEFELYKVREINDYHHAHDAYLNAVIGKALLGVYPQLEPEFVYGDYPHFHGHKENKATAKKFFYSNIMNFFKKDDVRTDKNGEIIWKKDEYISNIKKVLSYPQVNIVKKVEEQTGGFSKESILPKGNSDKLIPRKTKKFYWDTKKYGGFDSPIVAYSILVIADIEKGKSKKLKTVKALVGVTIMEKMTFERDPIAFLERKGYRNVQEENIIKLPKYSLFKLENGRKRLLASARELQKGNEIVLPNHLGTLLYHAKNIHKVDEPKHLDYVDKHKDEFKELLDVVSNFSKKYTLAEGNLEKIKELYAQNNGEDLKELASSFINLLTFTAIGAPAAFKFFDKNIDRKRYTSTTEILNATLIHQSITGLYETRIDLSKLGGD

SEQ ID NO: 729 - protein, 1345 aa, Streptococcus mutans; identical to SEQ ID NO: 728

SEQ ID NO: 730 - protein, 1345 aa, Streptococcus mutans
MKKPYSIGLDIGTNSVGWAVVTDDYKVPAKKMKVLGNTDKSHIKKNLLGALLFDSGNTAEDRRLKRTTRRRYTRRRNRILYLQEIFSEEMGKVDDSFFHRLEDSFLVTEDKRGERHPIFGNLEEEVKYHENFPTIYHLRQYLADNPEKTDLRLVYLALAHIIKFRGHFLIEGKFDTRNNDVQRLFQEFLAVYDNTFENSSLQEQNVQVEEILTDKISKSAKKDRVLKLFPNEKSNGCFAEFLKLIVGNQADFKKHFELEEKAPLQFSKDTYEEELEVLLAQIGDNYAELFLSAKKLYDSILLSGILTVTDVSTKAPLSASMIQRYNEHQMDLTQLKQFIRQKLSDKYNEVFSDVSKDGYAGYIDGKTNQEAFYKYLKGLLNKIEGSGYFLDKIEREDFLRKQRTFDNGSIPHQIHLQEMRAIIRRQAEFYPFLADNQDRIEKLLTFRIPYYVGPLASGKSDFAWLSRKSADKITPWNFDEIVDKESSAEAFINRMTNYDLYLPNQKVLPKHSLLYEKFTVYNELTKVKYKTEQGKTAFFDANMKQEIFDGVFKVYRKVTKDKLMDFLEKEFDEFRIVDLTGLDKENKVFNASYGTYHDLCKILDKDFLDNSKNEKILEDIVLTLTLFEDREMIRKRLENYSDLLTKEQVKKLERRHYTGWGRLSAELIHGIRNKESRKTILDYLIDDGNSNRNFMQLINDDALSFKEEIAKAQVIGETDNLNQVVSDIAGSPAIKKGILQSLKIVDELVKIMGHQPENIVVEMARENQFTNQGRRNSQQRLKGLTDSIKEFGSQILKEHPVENSQLQNDRLFLYYLQNGRDMYTGEELDIDYLSQYDIDHIIPQAFIKDNSIDNRVLTSSKENRGKSDDVPSKDVVRKMKSYWSKLLSAKLITQRKFDNLTKAERGGLTDDDKAGFIKRQLVETRQITKHVARILDERFNTETDENNKKIRQVKIVTLKSNLVSNFRKEFELYKVREINDYHHAHDAYLNAVIGKALLGVYPQLEPEFVYGDYPHFHGHKENKATAKKFFYSNIMNFFKKDDVRTDKNGEIIWKKDEHISNIKKVLSYPQVNIVKKVEEQTGGFSKESILPKGNSDKLIPRKTKKFYWDTKKYGGFDSPIVAYSILVIADIEKGKSKKLKTVKALVGVTIMEKMTFERDPVAFLERKGYRNVQEENIIKLPKYSLFKLENGRKRLLASARELQKGNEIVLPNHLGTLLYHAKNIHKVDEPKHLDYVDKHKDEFKELLDVVSNFSKKYTLAEGNLEKIKELYAQNNGEDLKELASSFINLLTFTAIGAPATFKFFDKNIDRKRYTSTTEILNATLIHQSITGLYETRIDLSKLGGD

SEQ ID NO: 731 - protein, 1345 aa, Streptococcus mutans; identical to SEQ ID NO: 730

SEQ ID NO: 732 - protein, 1350 aa, Streptococcus mutans
MKKPYSIGLDIGTNSVGWAVVTDDYKVPAKKMTVLGNTDKSHIKKNLLGALLFDSGNTAADRRLKRTARRRYTRRRNRILYLQEIFAEEMSKVDDSFFHRLEDSFLVTEDKRGERHPIFGNLEEEVKYHENFPTIYHLRQYLADNPEKVDLRLVYLALAHIIKFRGHFLIEGKFDTRNNDVQRLFQEFLAVYDNTFENSSLQEQNVQVEEILTDKISKSAKKDRVLKLFPNEKSNGRFAEFLKLIVGNQADFKKHFELEEKTPLQFSKDTYEEELEVLLAQIGDNYAELFLSAKKLYDSILLSGILTVTDVSTKAPLSASMIQRYNEHQMDLAQLKQFIRQKLSDKYNEVFSDVSKDGYAGYIDGKTNQEAFYKYLKGLLNKIEGSGYFLDKIEREDFLRKQRTFDNGSIPHQIHLQEMRAIIRRQAEFYPFLADNQDRIEKILTFRIPYYVGPLARGKSDFAWLSRKSADKITPWNFDEIVDKESSAEAFINRMTNYDLYLPNQKVLPKHSLLYEKFTVYNELTKVKYKTEQGKTAFFDANMKQEIFDGVFKVYRKVTKDKLMDFLEKEFDEFRIVDLTGLDKENKAFNASYGTYHDLRKILDKDFLDNSKNEKILEDIVLTLTLFEDREMIRKRLENYSDLLTKEQVKKLERRHYTGWGRLSAELIHGIRNKESRKTILDYLIDDGNSNRNFMQLINDDALSFKEEIAKAQVIGETDNLNQVVSDIAGSPAIKKGILQSLKIVDELVKIMGHQPENIVVEMARENQFTNQGRRNSQQRLKGLTDSIKEFGSQILKEHPVENSQLQNDRLFLYYLQNGRDMYTGEELDIDYLSQYDIDHIIPQAFIKDNSIDNRVLTSSKENRGKSDDVPSEDVVNRMRPFWNKLLSSGLISQRKYNNLTKKELTPDDKAGFIKRQLVETRQITKHVARMLDERFNKEFDDNNKRIRRVKIVTLKSNLVSSFRKEFELYKVREINDYHHAHDAYLNAVVVKALLVKYPKLEPEFVYGEYPKYNSYRERKTATQKMFFYSNIMNMFKSKVKLADDQIVERPMIEVNDETGEIAWDKTKHITTVKKVLSYPQVNIVKKVEEQTIGQNGGLFDDNPKSPLEVIPSKLVPLKKALNPEKYGGYQKPTTAYPILLIVDTKQLIPISVMDKKRFEQNPVKFLKDKGYQQIEKNNFVKLPKYTLVDIGNGIKRLWASSKEVHKGNQLVVSKKSQDLLYHAHHLDNDYSNEYVKNHYQQFDILFNEITSFSKKCKLGKEHIQKIEEAYSKERDSASIEELADGFIKLLGFTQLGATSPFSFLGIKLNQKQYTGKKDYLLPCMEATLIHQSITGLYETRIDLSKLGGD

SEQ ID NO: 733 - protein, 1350 aa, Streptococcus mutans; identical to SEQ ID NO: 732

SEQ ID NO: 734 - protein, 1345 aa, Streptococcus mutans
MKKPYSIGLDIGTNSVGWAVVTDDYKVPDKKMKVLGNTDKSHIKKNLLGALLFDSGNTAEDRRLKRTARRRYTRRRNRILYLQEIFSEEMGKVDDSFFHRLEDSFLVTEDKRGERHPIFGNLEEEVKYHENFPTIYHLRQYLADNPEKTDLRLVYLALAHIIKFRGHFLIEGKFDTRNNDVQRLFQEFLAVYDNTFENSSLQEQNVQVEEILTDKISKSAKKDRVLKLFPNEKSNGRFAEFLKLIVGNQADFKKHFELEEKAPLQFSKDIYEEELEVLLAQIGDNYAELFLSAKKLYDSILLSGILTVTDVSTKAPLSASMIQRYNEHQMDLAQLKQFIRQKLSDKYNEVFSDVSKDGYAGYIDGKTNQEAFYKYLKGLLNKIEGSGYFLDKIEREDFLRKQRTFDNGSIPHQIHLQEMRAIIRRQAEFYPFLADNQDRIEKILTFRIPYYVGPLARGKSDFAWLSRKSADKITPWNFDEIVDKESSVEAFINRMTNYDLYLPNQKVLPKHSLLYEKFTVYNELTKVKYKTEQGKTAFFDANMKQEIFDGVFKVYRKVTKDKLMDFLEKEFDEFRIVDLTGLDKENKAFNASYGTYHDLRKILDKDFLDNSKNEKILEDIVLTLTLFEDREMIRKRLKNYSDLLTKEQLKKLERRHYTGWGRLSAELIHGIRNKESRKTILDYLIDDGNSNRNFMQLINDDALSFKEEIAKAQVIGETDNLNQVVSDIAGSPAIKKGILQSLKIVDELVKIMGHQPENIVVEMARENQFTNQGRRNSQQRLKGLTDSIKEFGSQILKEHPVENSQLQNDRLFLYYLQNGRDMYTGEELDIDYLSQYDIDHIIPQAFIKDNSIDNRVLTSSKENRGKSDDVPSKDVVRKMKSYWSKLLSAKLITQRKFDNLTKAERGGLTDDDKAGFIKRQLVETRQITKHVARILDERFYTETDENNKKIRQVKIVTLKSNLVSNFRKEFELYKVREINDYHHAHDAYLNAVIGKALLGVYPQLEPEFVYGDYPHFHGHKENKATAKKFFYSNIMNFFKKDDVRTDKNGEIIWKKDEHISNIKKVLSYPQVNIVKKVEEQTGGFSKESILPKGNSDKLIPRKTKKFYWDTKKYGGFDSPIVAYSILVIADIEKGKSKKLKTVKALVGVTIMEKMTFERDPVAFLERKGYRNVQEENIIKLPKYSLFKLENGRKRLLASARELQKGNEIVLPNHLGTLLYHAKNIHKVDEPKHLDYVDKHKDEFKELLDVVSNFSKKYTLAEGNLEKIKELYAQNNGEDLKELASSFINLLTFTAIGAPATFKFFDKNIDRKRYTSTTEILNATLIHQSITGLYETRIDLSKLGGD

SEQ ID NO: 735 - protein, 1345 aa, Streptococcus mutans
MKKPYSIGLDIGTNSVGWAVVTDDYKVSAKKMKVLGNTDKSHIKKNLLGALLFDSGNTAEDRRLKRTARRRYTRRRNRILYLQEIFAEEMSKVDDSFFHRLEDSFLVTEDKRGERHPIFGNLEEEVKYHENFPTIYHLRQYLADNPEKVDLRLVYLALAHIIKFRGHFLIEGKFDTRNNDVQRLFQEFLAVYDNTFENSSLQEQNVQVEEILTDKISKSAKKDRVLKLFPNEKSNGRFAEFLKLIVGNQADFKKHFELEEKAPLQFSKDTYEEELEVLLAQIGDNYAELFLSAKKLYDSILLSGILTVTDVSTKAPLSASMIQRYNEHQMDLAQLKQFIRQKLSDKYNEVFSDVSKDGYAGYIDGKTNQEAFYKYLKGLLNKIEGSGYFLDKIEREDFLRKQRTFDNGSIPHQIHLQEMRAIIRRQAEFYPFLADNQDRIEKILTFRIPYYVGPLARGKSDFAWLSRKSADKITPWNFDEIVDKESSAEAFINRMTNYDLYLPNQKVLPKHSLLYEKFTVYNELTKVKYKTEQGKTAFFDANMKQEIFDGVFKVYRKVTKDKLMDFLEKEFDEFRIVDLTGLDKENKAFNASYGTYHDLRKILDKDFLDNSKNEKILEDIVLTLTLFEDREMIRKRLENYSDLLTKEQVKKLERRHYTGWGRLSAELIHGIRNKESRKTILDYLIDDGNSNRNFMQLINDDALSFKEEIAKAQVIGETDNLNQVVSDIAGSPAIKKGILQSLKIVDELVKIMGHQPENIVVEMARENQFTNQGRRNSQQRLKGLTDSIKEFGSQILKEHPVEHSQLQNDRLFLYYLQNGRDMYTGEELDIDYLSQYDIDHIIPQAFIKDNSIDNRVLTSSKENRGKSDDVPSKNVVRKMKSYWSKLLSAKLITQRKFDNLTKAERGGLTDDDKAGFIKRQLVETRQITKHVARILDERFHTETDENNKKIRQVKIVTLKSNLVSNFRKEFELYKVREINDYHHTHDAYLNAVIGKALLGVYPQLEPEFVYGDYPHFHGHKENKATAKKFFYSNIMNFFKKDDVRTDKNGEIIWKKDEHISNIKKVLSYPQVNIVKKVEEQTGGFSKESILPKGNSDKLIPRKTKKFYWDTKKYGGFDSPIVAYSILVIADIEKGKSKKLKTVKALVGVTIMEKMTFERDPVAFLERKGYRNVQEENIIKLPKYSLFKLENGRKRLLASARELQKGNEIVLPNHLGTLLYHAKNIHKVDEPKHLDYVDKHKDEFKELLDVVSNFSKKYTLAEGNLEKIKELYAQNNGEDLKELASSFINLLTFTAIGAPATFKFFDKNIDRKRYTSTTEILNATLIHQSITGLYETRIDLSKLGGD

SEQ ID NO: 736 - protein, 1345 aa, Streptococcus mutans; identical to SEQ ID NO: 735

SEQ ID NO: 737 - protein, 1345 aa, Streptococcus mutans
MKKPYSIGLDIGTNSVGWSVVTDDYKVPAKKMKVLGNTDKSHIEKNLLGALLFDSGNTAEDRRLKRTARRRYTRRRNRILYLQEIFSEEMGKVDDSFFHRLEDSFLVTEDKRGERHPIFGNLEEEVKYHENFPTIYHLRQYLADNPEKVDLRLVYLALAHIIKFRGHFLIEGKFDTRNNDVQRLFQEFLAVYDNTFENSSLQEQNVQVEEILTDKISKSAKKDRVLKLFPNEKSNGRFAEFLKLIVGNQADFKKHFELEEKAPLQFSKDTYEEELEVLLAQIGDNYAELFLSAKKLYDSILLSGILTVTDVGTKAPLSASMIQRYNEHQMDLAQLKQFIRQKLSDKYNEVFSDVSKDGYAGYIDGKTNQEAFYKYLKGLLNKIEGSGYFLDKIEREDFLRKQRTFDNGSIPHQIHLQEMRAIIRRQAEFYPFLADNQDRIEKLLTFRIPYYVGPLARGKSDFAWLSRKSADKITPWNFDEIVDKESSAEAFINRMTNYDLYLPNQKVLPKHSLLYEKFTVYNELTKVKYKTEQGKTAFFDANMKQEIFDGVFKVYRKVTKDKLMDFLEKEFDEFRIVDLTGLDKENKVFNASYGTYHDLCKILDKDFLDNSKNEKILEDIVLTLTLFEDREMIRKRLENYSDLLTKEQVKKLERRHYTGWGRLSAELIHGIRNKESRKTILDYLIDDGNSNRNFMQLINDDALSFKEEIAKAQVIGETDNLNQVVSDIAGSPAIKKGILQSLKIVDELVKIMGHQPENIVVEMARENQFTNQGRRNSQQRLKGLTDSIKEFGSQILKEHPVENSQLQNDRLFLYYLQNGRDMYTGEELDIDYLSQYDIDHIIPQAFIKDNSIDNRVLTSSKENRGKSDDVPSKDVVRKMKSYWSKLLSAKLITQRKFDNLTKAERGGLTDDDKAGFIKRQLVETRQITKHVARILDERFNTETDENNKKIRQVKIVTLKSNLVSNFRKEFELYKVREINDYHHAHDAYLNAVIGKALLGVYPQLEPEFVYGDYPHFHGHKENKATAKKFFYSNIMNFFKKDDVRIDKNGEIIWKKDEHISNIKKVLSYPQVNIVKKVEEQTGGFSKESILPKGNSDKLIPRKTKKFYWDTKKYGGFDSPIVAYSILVIADIEKGKSKKLKTVKALVGVTIMEKMTFERDPVAFLERKGYRNVQEENIIKLPKYSLFKLENGRKRLLASARELQKGNEIVLPNHLGTLLYHAKNIHKVDEPKHLDYVDKHKDEFKELLDVVSNFSKKYTLAEGNLEKIKELYAQNNGEDLKELASSFINLLTFTAIGAPATFKFFDKNIDRKRYTSTTEILNATLIHQSITGLYETRIDLSKLGGD

SEQ ID NO: 738 - protein, 1345 aa, Streptococcus mutans; identical to SEQ ID NO: 737

SEQ ID NO: 739 - protein, 1355 aa, Streptococcus mutans
MKKSYSIGLDIGTNSVGWAVVTDDYKVPAKKMKVLGNTDKSHIKKNLLGALLFDSGNTAEDRRLKRTARRRYTRRRNRILYLQEIFSEEMGKVDDSFFHRLDESFLTDDDKNFDSHPIFGNKAEEDAYHQKFPTIYHLRKHLADSTEKADLRLVYLALAHMIKFRGHFLIEGELNAENTDVQKLFADFVGVYDRTFDDSHLSEITVDASSILTEKISKSRRLEKLINNYPKEKKNTLFGNLIALSLGLQPNFKTNFKLSEDAKLQFSKDTYEEDLEELLGKIGDDYADLFTLAKNLYDAILLSGILTADDSSTKAPLSASMIKRYAEHHEDLEKLKEFIKANKPELYHDIFKDETKNGYAGYIENGVKQDEFYKYLKNTLSKIAGSDYFLDKIEREDFLRKQRTFDNGSIPHQIHLQEMHAILRRQGDYYPFLKENQDRIEKILTFRIPYYVGPLARKNSRFAWAEYHSDEAVMPWNFDQVIDKESSAQAFIEHMTNNDLYLPNEKVLPKHSPLYEKYTVYNELTKIKYVTEIGEAKFFDANLKQEIFDGLFKHERKVTKKKLRTFLDKNFDEFRIVDIQGLDKETETFNASYATYQDLLKVIKDKVFMDNPENAEILENIVLTLTLFEDREMIKQRLAKYADVFDKKVIDQLARRHYTGWGRLSAKLLNGIRDKQSCKTIMDYLIDDAQSNRNLMQLITDDNLTFKDDIVKAQYVDNSDDLHQVVQSLAGSPAIKKGILQSLKIVDELVKVMGKEPEQIVVEMARENQTTAKGRRNSQQRYKRLKEAIKSLDRDLNHKILKEHPTDNQALQNNRLFLYYLQNGRDMYTGESLDINRLSDYDIDHVIPQAFIKDNSIDNRVLTSSKANRGKSDDVPSEDVVNRMRPFWNKLLSSGLISQRKYNNLTKKELTPDDKAGFIKRQLVETRQITKHVARMLDERFNKEFDDNNKRIRRVKIVTLKSNLVSSFRKEFELYKVREINDYHHAHDAYLNAVVVKALLVKYPKLEPEFVYGEYPKYNSYRERKTATQKMFFYSNIMNMFKSKVKLADDQIVERPMIEVNDETGEIAWDKTKHITTVKKVLSYPQVNIVKKVEEQTIGQNGGLFDDNPKSPLEVIPSKLVPLKKALNPEKYGGYQKPTTAYPILLIVDTKQLIPISVMDKKRFEQNPVKFLKDKGYQQIEKNNFVKLPKYTLVDIGNGIKRLWASSKEVHKGNQLVVSKKSQDLLYHAHHLDNDYSNEYVKNHYQQFDILFNEITSFSKKCKLGKEHIQKIEEAYSKERDSASIEELADGFIKLLGFTQLGATSPFSFLGIKLNQKQYTGKKDYLLPCMEATLIHQSITGLYETRIDLNKLGGD

SEQ ID NO: 740 - protein, 1355 aa, Streptococcus mutans; identical to SEQ ID NO: 739

SEQ ID NO: 741 - protein, 1125 aa, Streptococcus mutans
MTNGKILGLDIGIASVGVGIINAKTGNVEHASSRIFPAANADNNVERRSARGGRRLIRRKKHRLKRVEDLFEKYNIDTDFSNLNLNPYQLRVKGLNEQLSNEELFAILKNIAKRRGISYLDDAEDDSVGSSDYAKAIDENRKLLKKQTPGEIQLKRLEKYGQLRGNFTIQDENGEYHRLINVFSTSDYVKEARRILETQSYYNKFITESFVEDYIKILQGKRKYYVGPGNEKSRTDYGIYRTDGETLDNLFGILIGKCGFYPEEYRAAKASYTAQEYNFLNDLNNLTVPTETKKLSTEQKYQLVDFAKTASTLEAAKLLKEIAKLVGCQVEEIKGYRLDNKDKPDLHTFEPFRKLKSNLTTIAVENLSITTLDTLAHILTLNTEREGIEEAIQKELPNIFSDEQITGIIAVRKKNSQIFGKGWHSFSIKLMKELIPELYETSEEQMTILIRLKKVKTNSKITNRTKYINEQEVTDEIYNPVVSKSIRQTVKIINAAIKKYGAFDQIVIEMPRESNEEDERKFIADLQKSNAKEKDDAMKQAALLYNGKAELPHGVFHGHKELATKIRLWYQQGERCLYSGKHIDIHDLIHNQHMFEIDHVLPLSLSFDDSLANKVLVYSWANQEKGQRTPFQALPQMASAWSFRELRDYISKQKGISKKKRDYLLTEQDINKVEVKQKFIERNLVDTRYVSRVVLNTLQDALKVMNKETKISVIRGQFTSQLRRQWRIDKSRETYHHHAVDALIIAASSQLRLWKKQNNPMFAEDKHGQKINLDTGEVLSDDAYKELVYQAPYQGFVNTISSKSFEDEILFSYQVDSKVNRKISDATIYATRQAQLGKDKKEETYVLGKIKDIYSQAGYDAFRKKYDKDKAVFLMYQKDPETWEKVIEVILRDYKELDDKGKEIGNPFERYKVKHGFVRKYSRKNKGTEIKSLKYYDNKLGNHIDITPNNSKHSVVLQSINPWRADLYFNPETTKYELMGLKYADLSFEKGTGKYSISREKYDEIKEREGISSKSEFKFTLYKNDLILVKDIGNHKELIARFNSKNDTSKHYVELKPWNKAKFDSEEELIPAFGKVAKSGQFIKGLNKPDLSIYKVKTDILGHKYYIKKEGDKPKLNFENKIKNK

SEQ ID NO: 742 - protein, 1125 aa, Streptococcus mutans
MTNGKILGLDIGIASVGVGIINAKTGNVEHASSRIFPAANADNNVERRSARGGRRLIRRKKHRLKRVEDLFEKYNIDTDFSNLNLNPYQLRVKGLNEQLSNEELFAILKNIAKRRGISYLDDAEDDSVGSSDYAKAIDENRKLLKKQTPGEIQLKRLEKYGQLRGNFTIQDENGEYHRLINVFSTSDYVKEARRILETQSYYNKFITESFVEDYIKILQGKRKYYVGPGNEKSRTDYGIYRTDGETLDNLFGILIGKCGFYPEEYRAAKASYTAQEYNFLNDLNNLTVPTETKKLSTEQKYQLVDFAKTASTLGAAKLLKEIAKLVGCQVEEIKGYRLDNKDKPDLHTFEPFRKLKSNLTTIAVENLSITTLDTLAHILTLNTEREGIEEAIQKELPNIFSDEQITEIIAVRKKNSQIFGKGWHSFSIKLMKELIPELYETSEEQMTILTRLKKVKTNSKITNRTKYINEEEITDEIYNPVVSKSIRQTVKIINATIKKYGAFDQIIIEMPRESNEEDERKFIADLQKSNAKEKDDAMKQAALLYNGKDELPHDVFHGHKELATKIRLWYQQGERCLYSGKHIDIHDLIHNQHMFEIDHVLPLSLSFDDSLANKVLVYSWANQEKGQRTPFQALPQMASAWSFRELRDYISKQKGISKKKRDYLLTEQDINKVEVKQKFIERNLVDTRYVSRVVLNTLQDALKVMNKETKISVIRGQFTSQLRRQWRIDKSRETYHHHAVDALIIAASSQLRLWKKQNNPMFAEDKHGQKINLDTGEVLSDDAYKELVYQAPYQGFVNTISSKSFEDEILFSYQVDSKVNRKISDATIYATRQAQLGKDKKEETYVLGKIKDIYSQAGYDAFRKKYDKDKAVFLMYQKDPETWEKVIEVILRDYKELDDKGKEIGNPFERYKVKHGFVRKYSRKNKGTEIKSLKYYDNKLGNHIDITPNNSKHSVVLQSINPWRADLYFNPETTKYELMGLKYADLSFEKGTGKYSISREKYDEIKEREGISSKSEFKFTLYKNDLILVKDIGNHKELIARFNSKNDTSKHYVELKPWNKAKFDSEEELIPAFGKVAKSGQFIKGLNKPDLSIYKVKTDILGHKYYIKKEGDKPKLNFENKIKNK

SEQ ID NO: 743 - protein, 1125 aa, Streptococcus mutans; identical to SEQ ID NO: 742

SEQ ID NO: 744 - protein, 1125 aa, Streptococcus mutans; identical to SEQ ID NO: 741

SEQ ID NO: 745 - protein, 670 aa, Streptococcus oralis
MAKFNKNYSIGLDIGVSSVGYAVVTEDYRVPAFKFKVLGNTEKEKIKKNLIGSTTFVPAQSAQGTRVFRVNRRRIDRRNHRIAYLRDIFQKEIGKIDKNFYRRLDESFRVLGDKSEDIQIKQPFFGNKELETAYHKKYPTIYHLRKHLADADKNSPVADIREVYMALSHIFKYRGHFLTLGKIDPNNINMQNSWIDFIESCQDAFDLEISDESKTIAAIFKSSDNRQEKVKGILSYFQPELAKKDKSIFKQLLQLLFGLKTKFKECFELEEEPDLNFSKENYDENLENLLGTLEEDFPDVFAKLKILRDTILLSDMLTYTGATHARFSATMVERYEEHRKDLQRFKSFVKQNLSEQDYLDIFGRKTPNGFDVDKETKGYVGYISNKMVLTNKQKTIQQNFYDYISGKITGIEGAEYFLNKISDGTFLRKLRTTDNGTIPNQIHAYELEKIIERQGRDYPFLLENKDKLLSILTFKIPYYVGPLAKGNNSRFAWIKRTTSQDVLDNNDEDTKNGKIRPWNYHKLINMDETRDAFITNLIGNDIILLNEKVLPKRSLIYEEVMLQNELTRIKYKDKYGKIHFFDSELRQEIINNLFKTNSKRVSSAMLLAYLENFTNLQAVEIVSGIEKGKSLNSTLKTYNDLKTIFSEDLLDSEIYQKELEEIIKVITVFV

SEQ ID NO: 746 - protein, 1373 aa, Streptococcus oralis
MENKNYSIGLDIGTNSVGWAVITDDYKVPSKKMKVLGNTDKRFIKKNLIGALLFDEGTTAEARRLKRTARRRYTRRKNRLRYLQEIFAEEMSKVDSSFFHRLDDSFLIPEDKKGSKYPIFATLIEEKEYHKQFPTIYHLRKQLADSKEKTDLRLIYLALAHMIKYRGHFLYEDTFDIKNNDIQKIFNEFISIYNNTFEGNSLSGQNVQVEAIFTDKISKSAKRERVLKLFPDEKSTGLFSEFLKLIVGNQADFKKHFDLEEKAPLQFSRDTYDEDLENLLGQIGDDFADLFVAAKKLYDAILLSGILTVTDPSTKAPLSASMIERYENHQKDLATLKQFIKTNLPEKYDEVFSDQSKDGYAGYIDGKTTQESFYKYIKNLLSKFEGADYFLEKIEREDFLRKQRTFDNGSIPHQIHLQEMNAILRRQGEHYPFLKENKEKIEKILTFRIPYYVGPLARGNRDFAWLTRNSDQAIRPWNFEEIVDKASSAESFINKMTNYDLYLPEEKVLPKHSLLYETFAVYNELTKVKFIAEGLRDYQFLDSRQKKDIFYTLFKAEDKRKVTEKDIIQYLHTVDGYDGIELKGIEKQFNASLSTYHDLLKIIKDKEFMDDPNNEEILENIVHTLTIFEDREMIKQRLAQYDSLFDEKVIKALTRRHYTGWGKLSSKLINGIRDKQTGKTILDYLMDDGYNNRNFMQLINDDELSFKEIIKKAQVVGKTDDVKQVVQELPGSPAIKKGILQSIKLVDELVKVMGHEPESIVIEMARENQTTARGKKNSQQRYKRIEDSLKILASGLNAKILKEHPTDNIQLQNDRLFLYYLQNGRDMYTGKPLDINQLSSYDIDHIVPQAFIKDDSLDNRVLTSLKDNRGKSDNVPSLEVVEKMKTFWQQLLDSKLISYRKFNNLTKAERGGLDERDKVGFIKRQLVETRQITKHVAQILDARYNTEVNEKDKKNRTVKIITLKSNLVSNFRKEFRLYKIREINDYHHAHDAYLNAVVAKAILKKYPKLEPEFVYGDYQKYDLKRYISRSKDPKEIEKATEKYFFYSNLLNFFKEEVHYADGTIVKRENIEYSKDTGEIAWNKEKDFATIKKVLSLPQVNIVKKREVQTGGFSKESILPKGNSDKLIPRKTKDILWDTTKYGGFDSPVIAYSILLIADIEKGKAKRLKTVKTLVGITIMEKATFEKSPIAFLENKGYHNVRKENILCLPKYSLFELKNGRRRMLASAKELQKGNEIVLPVHLTTLLYHAKNIHRLDEPEHLEYIQKHRNEFKGLLNLVSEFSQKYVLADANLEKIKNLYADNEQADIEILANSFINLLTFTALGAPAAFKFFGKDVDRKRYTTVSEILNATLIHQSITGLYETRIDLSKLGED

SEQ ID NO: 747 - protein, 1371 aa, Streptococcus oralis
MENKNYSIGLDIGTNSVGWSVITDDYKVPSKKMKVLGNTDKRFIKKNLIGALLFDEGTTAEARRLKRTARRRYTRRKNRLRYLQEIFAEEMSKVDSSFFHRLDDSFLIPEDKRGSKYPIFATLAEEKEYHKQFPTIYHLRKQLADSKEKTDLRLIYLALAHMIKYRGHFLYEDTFDIKNNDIQKIFSEFISIYDNTFEGSSLSGQNAQVEAIFTDKISKSAKRERVLKLFPDEKSTGLFSEFLKLIVGNQADFKKHFDLGEKAPLQFSKDTYDEDLENLLGQIGDDFADLFLVAKKLYDAILLSGILTVTDPSTKAPLSASMIERYENHQKDLAVLKQFIKNNLPEKYDEVFSDQSKDGYAGYIDGKTTQEAFYKYIKNLLSKFEGTDYFLEKIEREDFLRKQRTFDNGSIPHQIHLQEMNAILRRQGEHYPFLKDNKEKIEKILTFRIPYYVGPLARGNRDFAWLTRNSDEAIRPWNFEEIVDKASSAEDFINKMTNYDLYLPEEKVLPKHSLLYETFAVYNELTKVKFIAEGLRDYQFLDSGQKKQIVTQLFKEKRKVTEKDIIQFLHNVDGYDGIELKGIEKQFNASLSTYHDLLKIIKDKEFMDDSKNEEILENIVHTLTIFEDREMIKQRLAQYDSLFDEKVIKALIRRHYTGWGKLSAKLIDGICDKQTGNTILDYLIDDGKNNRNFMQLINDDGLSFKEITQKAQVVGKTDDVKQVVQELPGSPAIKKGILQSIKIVDELVKVMGHTPESIVIEMARENQTTARGKKNSQQRYKRIEDALKNLASGLDSNILKEHPTNNIQLQNDRLFLYYLQNGRDMYTGKPLDINQLSSYDIDHIVPQAFIKDDSLDNRVLTSLKDNRGKSDNVPSIEVVQKRKAFWQQLLDSKLISERKFNNLTKAERGGLDERDKVGFIKRQLVETRQITKHVAQILDARFNKEVNEKDKKNRTVKIITLKSNLVSNFRKEFRLYKVREINDYHHAHDAYLNAVVAKAILKKYPKLEPEFVYGDYQKYDLKRYISRSRNPKEVEKATEKYFFYSNLLNFFKEEVHYADGTIVKRENIEYSKDTGEIAWNKEKDFATIKKVLSYPQVNIVKKREVQTGGFSKESILPKGNSDKLIPRKTKDILWETTKYGGFDSPVIAYSILLIADIEKGKAKKLKTVKTLVGITIMEKAAFEENPITFLENKGYHNVRKENILCLPKYSLFELENGRRRLLASAKELQKGNEIVLPVYLTTLLYHSKNVHKLDEPEHLEYIQKHRNEFKDLLNLVSEFSQKYVLADANLEKIQNLYADNEQADIEILANSFINLLTFTALGAPAAFKFFGKDIDRKRYTTVSEILNATLIHQSITGLYETRIDLSKLGED

SEQ ID NO: 748 - protein, 1121 aa, Streptococcus oralis
MNGLVLGLDIGIASVGVGILEKNSGKIIHANSRLFPAATADNNVERRKNRQARRLNRRKKHRGVRFQDLFEDYGLLTDFSKVSINLNPYRLRVDGLNQQLTNEELFIALKNIVKRRGISYLDDASEDGGAVSSDYGKAVEENRKLLAEQTPGQIQLERFEKYGQVRGDFTVVENGEKCRLINVFSTSAYRKEAEKILRKQQEFNNQITDEFIEDYLKILTGKRKYYHGPGNEKSRTDYGRFRTDGTTLDNIFGVLIGKCTFYPNEYRASKSSYTAQEFNLLNDLNNLTVPTETKKLSEEQKKVIVEYAKEAKTLGASTLLKYIVKMIDASVDQISGYRVDVNNKPEMHTFEVYRKMQSLETISVGELSRNVLDELAHILTLNTEREGIEEAINSKLMGVFSQDQVLELVQFRKNNSSLFSKGWHNFSLKLMMELIPELYETSEEQMTILTRLGKQKSKETSKRTKYIDEKELTEEIYNPVVAKSVRQAIKIINEATKKHGIFDNIVIEMARENNEEDAKKDYIKRQKANQDEKNAAMEKAAFQYNGKKELPGNIFNGHKELATKIRLWHQQGEKCLYTGKTIPISDLIHNQYKYEIDHILPLSLSFDDSLSNKVLVHATANQEKGQRTPFQALDSMDDAWSYREFKSYVKDLKSLSNKKKDYLLTEEDISKIEVKQKFIERNLVDTRYSSRVVLNALQDFYKSHQFDTTISVVRGQFTSQLRRKWGLEKSRETYHHHAVDALIIAASSQLRLWKKQNNPLITYKEGQFVDSQTGEIISLTDDEYKELVFKAPYDHFVDTLHSKTFEDGILFSYQVDSKYNRKISDATIYATRKAKLDKDKSEETYVLGKIKDIYSQAGYDAFIKIYNKDKRKFLMYHKDPQTFEKVIEEILRTYPSKERNDKNKEVPCNPFEKYRQENGPIRKYSKKGNGPEIKCLKYYDNKLGNYIDISPDGSDNQVVLQSLKPWRTDVYFNHQTKEYELMGLKYSDLSFEKGSGKYSISNEKYNSIKRIEGVNEQSEFKFTLYKNDLILIKDSENNEQKLFRFNSRNDTAKHYVELKPYDKARFDGQQELITILGNVAKGGQCLKGLNKSNISIFKVKTDVLGKKHIIKKEGDEPKLKF

SEQ ID NO: 749 - protein, 1134 aa, Streptococcus oralis
MNGLVLGLDIGIASVGVGILEKNSGKIVHASSRIFPAATADNNVERRKNRQARRLHRRKKHRGARLKDLFEYYGLLTDFSKVSINLNPYRLRVDGLDQQLTNEELFIALKNIVKRRGISYLDDASEDGGTVSSDYGKAVEENRKLLAEQTPGQIQLERFEKYGQLRGDFTVVENSEKCRLINVFSTSAYKKEAERILRKQQEFNNQITDEFIEDYLKILTGKRKYYHGPGNEKSRTDYGRFRTDGATLDNIFGILIGKCTFYPNEYRASKASYTAQEFNLLNDLNNLTVPTETKKLSEEQKKTIIEYAKSAKTLGASTLLKYIAKMIDASVDQIRGYRVDVNNKPEMHTFEVYRKMQSLETISVGELSRNILDELAHILTLNTEREGIEEAINTKLRDSFSQDQVLELVQFRKNNSSLFSKGWHNFSLKLMMELIPELYETSEEQMTILTRLGKQKSKETSKRTKYIDEKEVTEEIYNPVVAKSVRQAIKIINEATKKHGIFDNIVIEMARENNEEDAKKDYIKRQKANQDEKYAAMEKAAFQYNGKKELPDNIFHGHKELATKIRLWHQQGEKCLYTGKSIPISDLIHNQYKYEIDHILPLSLSFDDSLSNKVLVLATANQEKGQRTPFQALDSMDDAWSYREFKSYVKESKLLGNKKKEYLLTEEDISKIEVKQKFIERNLVDTRYSSRVVLNALQDFYKNHNFDTTISVVRGQFTSQLRRKWGLEKSRETYHHHAVDALIIAASSQLRLWKKQNNPLIAYKEGQFVDSQTGEIISLTDDEYKELVFKAPYDHFVDTLSSKTFEDSILFSYQVDSKFNRKISDATIYATRKAKLDKEKKEYTYTLGKIKDIYSLGTKTPSKTGFYKFLDLYNKDKSQFLMFQKDRKTWDEVIEKIMEQYRPFKEYDKAGKLVDFNPFEKYRQENGPIRKYSKKGNGPEIKSLKYYDILLGKHKNITPEGSRNTVALLSLNPWRTDVYYNMETKKYEFLGLKYADLPFEEGGAYGISTETYNELREKEGIGKNSEFKFTLYKNDLILIKDTETNCQQFFRFWSRTGKDNPKSFEKHKIELKPYEKAKFEKGEELEVLGKVPPSSNQFQKNMQIENLSIYKVKTDVLGNKHFIKKEGDKPKLKF

SEQ ID NO: 750 - protein, 550 aa, Streptococcus oralis
MYSLDKNGSPTPLYRDQLNQYEVDHIIPYSFLPIDSIDNKVLTHRENNQRKLDNIPDKETVANMKPFWEKLYNAKLISQTKYQRLTTSERTPDGVLTESMKAGFIERQLVETRQIIKHVARILDNRFSDTKIITLKSQLVTNFRNTFHIAKIRELNDYHHAHDAYLAVVVGQTLLKAYPKLAPELIYGHHAHFNRHEENKATIRKYLYSNIMRFFNNPDSKVSKDIWDCNRDLPIIKDIIYNSQVNFVKRTMIKKGAFYNQNPVGKFNKQIAANNRYPLKTKVSSLDTSIYGGYGPMNSALSIIIIAERFNEKKCKIETVKEFHDIFIIDYKKFNNDPFQFLNDTSENGFLKKNNINRVLAFYRVPKYSLMQKIDGTRMLFESKSNLHKATQFKLTKTQNELFFHMRRLLTKSNLMDLKSESAIKESQNFILKHKEEFDNISNQLSAFSQKMLGDTTSLKNLIKGYNERKIKEINSSEETIKYFYDNFIKMFSFVKSGAPKDINDFFNNKYTVARMRPKPDKKLLNATLIHQSITGLYETRIDLSKLGED

SEQ ID NO: 751 - protein, 1140 aa, Streptococcus parasanguinis
MNGLVLGLDIGIASVGVGILKKDIGEIIHTNSRLFSAATADSNIERRGHRGGKRLTRRKKHRSIRLHDLFEDFGLLTDFSKVSINLNPYQLRVQGLDNQLTNEELFIALKNIVKRRGISYLDDASEDGGTVSSDYGKAVEENRKLLAEQTPGQIQLDRFEKYGQVRGDFNVVENGEKRRLINVFTTSAYSKEAERILRKQQEFNKKITDEFIEDYLTILTGKRKYYHGPGNEKSRTDYGRYTTKKDPEGKYITLDNIFGILIGKCTFYPDEYRASKASYTAQEFNLLNDLNNLTVPTETKKLSEEQKKTIIKYAKTAKTLGASTLLKYIAKLIGASVDQIHGYRIDPNKKPEMHTFETYRKMQSLETISVEELPRKVLDELAHILTLNTEREGIEEAINATLKDTFSQDQVLELVQFRKNNSSLFSKGWHSFSLKLMMELIPELYETSEEQMTILTRLGKQKSKETSKRTKYIDEKELTEEIYNPVVAKSVRQAIKIINEATKKYGIFDNIVIEMARENNEEDAKKEYIKRQKANLDEKNAAMEKAAFQYNGKKELPDNVFHGHKELATKIRLWHQQGEKCLYTGKNIPISDLIQNQYKYEIDHILPLSLSFDDSLSNKVLVLATANQEKGQRTPFQALDSMDDAWSYREFKSYVKDSKLLGNKKKEYLLTEEDISKIEVKQKFIERNLVDTRYSSRVVLNALQDFYKEHQFDTTISVVRGQFTSQLRRKWGLEKSRETYHHHAVDALIIAASSQLRLWKKQNNPLISYTEGQFVDQVTGEIISLSDDEYKELVFKAPYDHFVDTLKSKKFEDSILFSYQVDSKYNRKISDATIYATRKAKLDKENKEYTYTLGKIKDIYALGTKSPSKTGFYKFLDLYNKDKSQFLMFQKDRKTWDEVIEKIIEQYRPFKEYDENGKEVDFNPFEKYRIENGPIRKYSKKGNGPEIKSLKYYDNLLGKFVDITPSESKNPVALLSLNPWRTDVYYNTETSKYEFLGLKYADLCFEKGGAYGISEVKYNKIREKEGIGKESEFKFTLYKNDLILIKDTETNCQQIFRFWSRTGKDNPKSFEKHKIELKPYEKARFEKGEELEVLGKVPPSSNQLQKNMQIENLSIYKVKTDVLGNKHFIKKEGEEPKLKF

SEQ ID NO: 752 - protein, 1374 aa, Streptococcus pseudoporcinus
MKKRYSYSIGLDIGTNSVGWAVINEDYKVPAKKMTVFGNTDRKTIKKNLLGTVLFDSGETAQARRLKRTNRRRYTRRRYRLCQLQNIFATEMVKVDDTFFQRLSESFFYYQDKAFDKHPIFGNSKEERAYHKTYPTIYHLRKDLADRDQKADLRLIYLALSHIIKFRGHFLIEGKLNSENTDVQKLFIALVTVYNLLFEEEPIAGETCDAKALLTAKTSKSKRLESLISEFPGQKKNGLFGNLLALALGLRPNFKSNFGLSEDAKLQITKDTYEEELDNLLAEIGDHYADLFLAAKNLSDAILLSDILTLSDENTRAPLSASMIKRYEEHQEDLALLKKLVKEQMPEKYWEIFSNAKKNGYAGYIEGKVSQEDFYRYIKPILSRLKGGDEFLAKIDRDDFLRKQRTFDNGSIPHQIHLKELHAILRRQEKYYPFLAEQKEKIEQLLCFRIPYYVGPLAKGGNSSFAWLKRRSDEPITPWNFKDVVDEEASAQAFIEGMTNYDTYLPEEKVLPKHSPLYEMFTVYNELTKVKYIAENMTKPLYLSAEQKEAIIDHLFKQTRKVTVKDLKEKYFSQIEGLENVDVTGVEGAFNASLGTYNDLLKIIKDKAFLDDEANAEILEEIVLILTLFQDEKLIEKRLAKYANLFEKSVLKKLRKRHYRGWGRLSRQLIDGMKDKASGKTILDFLKADDFANRNFIQLINDSSLDFEKLIDDAQKKAIKRESLTEAVANLAGSPAIKKGILQSLKVVDEIVKVMGHNPDNIVIEMSRENQTTAQGLKNARQRLKKIKEVHKKTGSRILEDNSERITNLTLQDNRLYLYLLQDGKDMYTGQDLDINNLSQYDIDHIIPQSFIKDNSIDNLVLTTQKANRGKSDNVPSIEVVRDMKDRVWRRQLANGAISRQKFDHLTKAERGGLADSDKARFLRRQLVETRQITKHVAQLLDSRFNSKSNQNKKLARNVKIITLKSKIVSDFRKDFGLYKLREVNNYHHAHDAYLNAVVGTALLKKYPKLEAEFVYGDYKHFDLVKLISKSDPSLGKATAKVFFYSNIMNFFKEELSLADGTLMKRPVIETNTETGEVVWDKVKDFKTIRKVLSYPQVNIVKKTEIQSGAFSKESVLSKGNSDKLIERKKGWDPKKYGGFDSPNTAYSIFVVAKVAKRKAQKLKTVKEIVGITIMEQAEYEKDNIAFLEKKGYQDIQEKLLIKLPKYSLFELENGRRRLLASANEFQKGNELALSGKYMKFLYLASRYDKLSSKIESEQQKKLFVEQHLHYFDEILDIVVKHATCYIKAENNLKKIISLYKKKEAYSINEQALNMLNLFIFTSLGAPSTFVFFDETIDRKRYTTSSDVLNGILIQQSITGLYETRIDLSRFGGD

SEQ ID NO: 753 - protein, 1052 aa, Streptococcus pyogenes
LSASMIKRYDEHHQDLTLLKALVRQQLPEKYKEIFFDQSKNGYAGYIDGGASQEEFYKFIKPILEKMDGTEELLAKLNREDLLRKQRTFDNGSIPHQIHLGELHAILRRQEDFYPFLKDNREKIEKILTFRIPYYVGPLARGNSRFAWMTRKSEETITPWNFEEVVDKGASAQSFIERMTNFDKNLPNEKVLPKHSLLYEYFTVYNELTKVKYVTEGMRKPAFLSGEQKKAIVDLLFKTNRKVTVKQLKEDYFKKIECFDSVEISGVEDRFNASLGTYHDLLKIIKDKDFLDNEENEDILEDIVLTLTLFEDREMIEERLKTYAHLFDDKVMKQLKRRRYTGWGRLSRKLINGIRDKQSGKTILDFLKSDGFANRNFMQLIHDDSLTFKEDLQKAQVSGQGDSLHEHIANLAGSPAIKKGILQTVKVVDELVKVMGRHKPENIVIEMARENQTTQKGQKNSRERMKRIEEGIKELGSDILKEYPVENTQLQNEKLYLYYLQNGRDMYVDQELDINRLSDYDVDHIVPQSFLKDDSIDNKVLTRSDKNRGKSDNVPSEEVVKKMKNYWKQLLNAKLITQRKFDNLTKAERGGLSELDKAGFIKRQLVETRQITKHVAQILDSRMNTKYDENDKLIREVRVITLKSKLVSDFRKDFQFYKVREINNYHHAHDAYLNAVVGTALIKKYPKLESEFVYGDYKVYDIRKMIAKSEQEIGKATAKYFFYSNIMNFFKTEITLANGEIRKRPLIETNGETGEIVWDKGRDFATVRKVLSMPQVNIVKKTEVQTGGFSKESILPKRNSDKLIARKKDWDPKKYGGFDSPTVAYSVLVVAKVEKGKSKKLKSVKELVGITIMERSSFEKDPVDFLEAKGYKEVRKDLIIKLPKYSLFELENGRKRMLASAGELQKGNELALPSKYVNFLYLASHYEKLKGSPEDNEQKQLFVEQHKHYLDEIIEQISEFSKRVILADANLDKVLSAYNKHRDKPIREQAENIIHLFTLTNLGAPAAFKCFDTTIGRNRYKSIKEVLDATLIHQSITGLYETRIDLSQLGGD

SEQ ID NO: 754 - protein, 1368 aa, Streptococcus pyogenes; identical to SEQ ID NO: 42

SEQ ID NO: 755 - protein, 1367 aa, Streptococcus pyogenes; identical to SEQ ID NO: 246

SEQ ID NO: 756 - protein, 1368 aa, Streptococcus pyogenes [sequence omitted]

SEQ ID NO: 757 - protein, 1370 aa, Streptococcus ratti
MKKPYSIGLDIGTNSVGWAVITDDYKVPAKKMKVLGNTDKNYIKKNLLGALLFDSGNTAEDRRLKRTARRRYTRRRNRLLYLQDIFSDEMNKVDESFFHRLEDSFLVSEDKRGDHHPIFGNVVDEVKYHEQFPTIYHLRKYLADTPEKADLRLVYLALAHMIKFRGHFLIDDPKLDVKNTDSQELFSQFLTAYDVTQEDSHLADVKINISDIITEKMNKSRKVEALLFHFPSQKKNSFFGNLVSLVFGLLPNFKTNFNLAEDAKLQLSKDSYDEDLENLLGQIGDEYTDVFVAARKLYDSILLSGILTVNDLSTKAILSASMVRRYEEHNKDLAKLKAFVKANFTHDVFKEVFSDASKNGYAGYIEGKTSQEDFYKYVKNLIGKVDGSADFIEKIDREDFLRKQRTFDNGSIPHQVHLAEMKAILRRQGEYYPFLKEHAEKIQQILTFRIPYYVGPLDRHGHSDFAWASFNSEEKVTPWNFEEIIDKNKSAQAFIERMTNQDLYLPNEKVLPKHSPLYEKYTVYNELTKIKYVTETGTAKFFDANLKQEIFDGLFKKERKVTKRKLLTFLEKNFDEFRIVDIQGLDKETETFNASYGIYQDLLKIIKDKAFMDDSENADILEDIVLTLTLFEDREMIKQRLAKYADLFDKKVIDNLARRRYTGWGRLSAKLLNGIRDKRSRKTIMDYLVDDGRSNRNLMQLITDDNLTFKDEIAKAQYSDNSDDLHQVVQDLAGSPAIKKGILQSVKIVDELVKVMGYEPEQIVVEMARENQTTAKGRRNSQQRYKRLEEAIKNLDRDLNYKILKEHPTDNQALQNDRLFLYYLQNGRDMYTGESLDINRLSDYDIDHIIPQAFIKDNSIDNRVLVSSAKNRGKSDDVPSEDVVNRMRPFWNKLLNCGLISQRKYSNLTKKELTPNDKAGFIKRQLVETRQITKHVARILDEHFNKEFDEDKKRIRKVKVVTLKSNLVSNFRKEFELYKVREINDYHHAHDAYLNAVVAKALLMKYPKLEPEFVYGEYPKYNSYRERKTATQRMFFYSNIMNMFKSKVKLADERIIERPMIEVNDETGEIAWDKTKHIATVKKVLSYPQINIVKKVEEQTGGLTNETIYPRGSFDKLLNRKNTLEASKYGGFGSPTVAYCVLVVADSKNENGKVKKLKLGSELLGITILEKNDFENNSLDFLSRKGYQGVQEKKIIKLPKYSLFEFQDGSRRMLSSVMANDNKRGDLQKANEMILPAYLVKLLYHAKHINSVGEPAHKNYINEHCSEFQDLLNYIRQFADKFVDVDKNLSKIRSLSKSMAEYSVSEICSSFVNLLTLTALGAPADFKFFGTTIPRKRYGSPQSILSATLIHQSITGLYETRIDLSKLGED

SEQ ID NO: 758 - protein, 1135 aa, Streptococcus salivarius
MSDLVLGLDIGIGSVGVGILNKVTGEIIHKNSRIFPAAQAENNLERRTNRQGRRLTRRKKHRRVRLNHLFEESGLITDFTKVSINLNPYQLRVKGLTAELSNEELFIALKNMVKHRGISYLDDASDDGNSSVGDYAQIVKENSKQLETKTPGQIQLERYQKYGQLRGDFTVEEDGRKHRLINVFPTSAYHAEALRILQTQQEFNPQITDEFINSYLEILTGKRKYYHGPGNEKSRTDYGKYTTKKDAQGQYITLNNIFGILIGKCTFYPEEYRAAKASYTAQEFNLLNDLNNLTVPTETKKLSEEQKYQIITYVKNEKAMGPAKLFKYIAKLLACDIADIKGYRIDKSDKAEIHTFEAYRKMKTLETIDIEQIEREKLDKLAYVLTLNTEREGIQEALDHEFADGTFSQEQVDELVQFRKANSSIFGKGWHSFSVKLMMELIPELYATSEEQMTILTRLGKQKTTSSSNKTKYIDEKQLTEEIYNPVVAKSVRQAIKIVNAAIKKYGDFDNIVIEMARETNEDDEKKAIQKIQKANKAEKDAAMRKAANQYNGKAELPHSVFHGHKQLATKIRLWHQQGERCLYTGKTISIHDLINNPNQFEIDHILPLSITFDDSLANKVLVYATANQEKGQRTPYQALDSMDDAWSFRELKAFVRESKALSNKKKEYLLTEEDISKFDVRKKFIERNLVDTRYASRVVLNALQEHFKAHKIDTKVSVVRGQFTSQLRRHWGIDKTRDTYHHHAVDALIIAASSQLNLWKKQKNTLVSYSEDQLLDIETGELISDDEYKESVFKAPYQHFVDTLKSKEFEDSILFSYQVDSKFNRKISDATIYATRQAKVGKDKKDETYVLGKIKDIYALGTKTPSKTGFYKFLDLYNKDKSQFLVYQKDRKTWDEVIEKIMEQYRPFKESDKNGKEVDFNPFEKYRIENGPIRKYSRKGNGPEIKSLKYYASKLGNHIDITPKDSNNKVVLQSVSPWRADVYFNKTTGSYEILGLKYADLQFEKGTGTYRISEEKYNDIKKKEGVDSDSEFKFTLYKNDLLLIKDTETKEQRLFRFLSRSMPNKKHYVELKPYSKDKFEKNESLIEILGSADKSGRCIKGLAKSNLSIFKVRTDVLGNQHIIKNEGDKPKLDF

SEQ ID NO: 759 - protein, 1127 aa, Streptococcus salivarius
MSDLVLGLDIGIGSVGVGILNKVTGEIIHKNSRIFPAAQAENNVERRINRQGRRLTRRKKHRRVRLNHLFEESGLITDFTNVSINLNPYQLRVKGLTDELSNEELFIALKNMVKHRGISYLDDASDDGNSSVGDYAQIVKENSKQLETKTPGQIQLERYQKYGQLRGDFTVEEDGKKHRLINVFPTSAYRAEALRILQTQQEFNPQITDEFINSYLQILTGKRKYYHGPGNEKSRTDYGRYTTKKDSEDEYITLDNIFGILIGKCTFYPEEYRAAKASYTAQEFNLLNDLNNLTVPTETKKLSEEQKNQIITNVKNEKAMGPAKLFKYIAKLLSCDVADIKGYRIDKSDKAEIHTFEAYRKMKTLATIDIEQMERENLDKLAYVLTLNTEKEGIQEALEHEFADGTFSQEQIDELVQFRKANSSIFGKGWHSFSVKLMMELIPELYATSEEQMTILTRLGKQKTTSSSNKTKYIDEKQLTEEIYNPVAAKSVRQAIKIVNAAIKEYGDFDNIVIEMARETNEDDEKKAIQKIQKANKDEKDAAMLKAANQYNGKAELPHSVFHGHKQLATKIRLWHQQGERCLYTGKTISIHDLINNSNQFEIDHILPLSITFDDSLANKVLVYATANQEKGQRTPYQALDSMDDAWSFRELKAFVRDSKALSNKKKEYLLTEEDISKFDVRKKFIERNLVDTRYASRVVLNALQEHFRVHKTDTKVSVVRGQFTSQLRRHWGIEKTRDTYHHHAVDALIIAASSQLNLWKKQKNTLVSYSEDQLLDIETGELISDDEYKESVFKAPYQHFVDTLKSKEFEDSILFSYQVDSKFNRKISDATIYATRQAKVGKDKKDETYVLGKIKDIYSQTGYDAFIKIYKKDKSKFLMYRHDPQTFEKVIEPILENYPNKELNEKGKEVPCNPFLKYKEDHGYIRKYSKKGNGPEIKSLKYYDSKLGNHIDITPKNSNNKVVLQSVSPWRADVYFNKTTGKYEILGLKYADLKFEKGTGTYKISEEKYNDIKIKEGVDSDSEFKFTLYKNDLLLIKDTETKEQQLFRFLSRTMPNVKHYVELKPYDKQKFDDNEELIKILGIVAKGGQCKKGVSKPNISIYKIRTDVLGNQHIIKNEGDKPKLDF

SEQ ID NO: 760 - protein, 1385 aa, Streptococcus salivarius
MTKPYSIGLDIGTNSVGWAVITDDYKVPSKKMKVLGNTSKKYIKKNLLGALLFDSGITAEGRRLKRTARRRYTRRRNRILYLQEIFSTEMATLDDAFFQRLDDSFLVPDDKRDSKYPIFGNLVEEKVYHDEFPTIYHLRKHLADSSKKADLRLVYLALAHMIKYRGHFLIEGDFNSKNNDLQKNFQDFLDTYNAIFESDLSLENSKQLEEIVKDKISKSAKKDRILKLFPGEKNSGIFSEFLKLIVGNQADFRKYFNLDEKTSLQFSKESYDEDLETLLGHIGDDYSDVFLKAKKLYDAILLSGILTVTDNGTEAPLSSAMIMRYKEHEEDLALLKAYIRNISLETYNEVFKDNTKNGYAGYIDGKTSQEDFYVYLKRLLAGLEGADYFLEKIDREDFLRKQRTFDNGSIPYQIYLQEMRAILDKQAKFYPFLAKNKERIEKILTFRIPYYVGPLARGNSDFAWSIRKRNEKITPWNFEDVIDKESSAEAFINRMTSFDLYLPEEKVLPKHSLLYENFTVYNELTKVRFIAEGMRDYQFLDSKQKKDIVRLYFKGKRKVTDKDIIEYLHAIDGYDGIELKGIEKQFNSSLSTYHDLLNIINDKEFLDDSSNETIIEEIIHTLTMFEDREMIKQRLSKFDNIFDKSVLKKLSRRHYTGWGKLSAKLINGIRDEKSGNTILDYLIDDGVSNRNFMQLIHDDALSFKKKIKKAQIIGDKDNIKQVVKSLPGSPAIKKGILQSIKIVDELVKVMGREPESIVVEMARENQYTNQGKSNSQQRLKRLEESLKGLGSKILKENVPTRLSKIDNNALQNDRLYLYYLQNGKDMYTGEELDIDRLSNYDIDHIIPQAFLKDDSIDNKVLVSSASNRGKSDDVPSLEVVKKRKTLWYQLLKSKLISQRKFDNLTKAERGGLSQEEKAGFIQRQLVETRQITKHVARLLDERFNNKKDENNRTLRTVKIITLKSSLVSQFRKDFELYKVREINDFHHAHDAYLNAVVASALLKKYPKLEPEFVYGDYPKYNSFRERKSATEKVYFYSNIMNIFKKSIPLADGTVIDRPLIEVNEETGESVWNKVADLNTVRKVLSYSQVNIVKKVEEQNHGLDRGKPKGLFNANLSSKPKPNSKENLVGAKEYLDPKKYGGYAGISNSFAILVKGTIEKGAKKKITNVLEFQGISILDRIYYRKDKLNFLLEKGYKDIELIIELPKYSLFELSDGSRRMLASILSTNNKRGEIHKGNQIFISQKFVKLLYHAKRISSTFNENHRKYVENHKKEFEELFYYILEFNENYVGAKKNGELLKSAFQSWQNHSIDELCSSFIGPTGSERKGLFELTSRGGAADFEFLGVKIPRYRDYTPSSLLKDATLIHQSVTGLYETRIDLGKLGED

SEQ ID NO: 761 - protein, 1392 aa, Streptococcus sanguinis
MENKNYSIGLDIGTNSVGWAVITDDYKVPSKKMKVFGNTDKHFIKKNLIGALLFDEGATAEDRRLKRTARRRYTRRKNRLRYLQEIFSEEISKLDSSFFHRLDDSFLVPKDKRGSKYPIFATLEEEKEYHKKFPTIYHLRKHLADSKEKTDLRLIYLALAHMIKYRGHFLYEESFDIKNNDIQKIFNEFISIYDNTFEGSSLSGQNAQVEAIFTDKISKSAKRERVLKLFSDEKSTSLFSEFLKLIVGNQADFKKHFDLEEKAPLQFSKDTYDEDLENLLGQIGDGFTDLFLVAKKLYDAILLSGILTVTDPSTKAPLSASMIERYESHQKDLAALKQFIKNNLPKRYNEVFSDQSKDGYAGYIDGKTTQEAFYKYIKNLLSKFEGADYFLDKIEREDFLRKQRTFDNGSIPHQIHLQEMNAILRRQGEHYPFLKENREKIEKILTFRIPYYVGPLARGNRDFAWLTRNSDQAIRPWNFEEIVDKASSAEEFINKMTNYDLYLPEEKVLPKHSLLYETFAVYNELTKVKFIAEGLRDYQFLDSGQKKQIVNQLFKEKRKVTEKDIIHYLHNVDGYDGIELKGIEKQFNASLSTYHDLLKIIKDKEFMDDPKNEEILENIVHTLTIFEDREMIKQRLAQYDSIFDEKVIKALTRRHYTGWGKLSAKLINGICDKQTGDTILDYLIDDGKINRNFMQLINDDGLSFKEIIQKAQVVGKTDDVKQVVQELPGSPAIKKGILQSIKIVDELVKVMGYAPESIVIEMARENQTTARGKKNSQQRYKRIEDSLKNLAPGLDSNILKENPTDNIQLQNDRLFLYYLQNGKDMYTGKPLDIDQLSSYDIDHIIPQAFIKDDSIDNRVLTSSKDNRGKSDNVPSLEVVQKRKAFWQQLLDSKLISERKFNNLTKAERGGLDERDKVGFIRRQLVETRQITKHVAQILDASFNTEVNEKNQKIRTVKIITLKSNLVSNFRKEFELYKVREINDYHHAHDAYLNAVVAKAILKKYPKLEPEFVYGDYQKYDLKRYISRFKPSKEIEKATEKYFFYSNLLNFFKEEVHYADGIIVKRENIEYSKDTGEIAWNKEKDFATIKKVLSYPQVNIVKKTEIQTHGLDRGKPKGLFNSNPSPKPSEDSKENLVPIKQGLDPRKYGGYAGISNSYAVLVKAIVEKGAKKQQKTILEFQGISILDKINFENNKENYLLKKRYIEILSTITLPKYSLFEFPDGTRRRLASILSTNNKRGEIHKGNELVLPGKYTTLLYHAKNINKKLEPEHLEYVEKHRNDFAKLLECVLNFNDKYVGALKNGERIRQAFTDWETVDIEKLCFSFIGPENSKNAGLFELTSQGSASDFEFLGVKIPRYRDYAPSSLLKATLIHQSITGLYETRIDLSKLGED

SEQ ID NO: 762 - protein, 1377 aa, Streptococcus sanguinis
MKKPYSIGLDIGTNSVGWAVITDDYKVPSKKMKVLGNTDKHFIKKNLIGALLFDEGTTAEDRRLKRTSRRRYTRRKNRLRYLQEIFSEEISKLDSSFFHRLDDSFLVPEDKRGSKYPIFATLEEEKEYHKKFPTIYHLRKHLADSKEKTDLRLIYLALAHMIKYRGHFLYEESFDIKNNDIQKIFNEFISIYDNTFEGSSLSGQNAQVEAIFTDKISKSTKRERVLKLFSDEKSTGLFSEFLKLIVGNQADFKKHFDLEEKAPLQFSKDTYDEDLENLLGQIGDGFADLFLVAKKLYDAILLSGILTVTDPSTKAPLSASMIERYENHQEDLAALKQFIKNNLSEKYAEVFSDQSKDGYAGFIDGKTTQEAFYKYIKNLLSKLEGADYFLNKIEREDFLRKQRTFDNGSIPHQIHLQEMNAILRRQGEHYLFLKENREKIEKILAFRIPYYVGPLARGNRDFAWLTRNSDQAIRPWNFEEVVDKASSAEDFINKMTNYDLYLPEEKVLPKHSLLYETFAVYNELTKVKFIAEGLRDYQFLDSGQKKQIVNQLFKDKRKVTEKDIIHYLHNVDGYDGIELKGIEKQFNASLSTYHDLLKIIKDKEFMDNPKNGEILENIIHTLTIFEDREMIKQRLAQYDTLFDEKVIKALTRRHYTGWGKLSAKLINGIRDKQTGKTILEYLIDDGDCNRNFMQLINDDGLSFKEIIQKAQVVGKTDDVKQVVQEIPGSPAIKKGILQSIKIVDELVKVMGHNPESIVIEMARENQTTAKGKKNSQQRYKRIEDALKNLAPGLDSNILKENPTDNIQLQNDRLFLYYLQNGKDMYTGKAIDINQLSNYDIDHIIPQAFIKDDSLDNRVLTSSKDNRGKSDNVPSIEVVQKRKAFWQQLLDSKLISERKFNNLTKAKRGGLDERDKVGFIKRQLVETRQITKHVAQLLDTRFNTEVNEENQKIRTVKIITLKSNLVSNFRKEFGLYKVREINDYHHAHDAYLNAVVAKAILKKYPKLEPEFVYGDYQKYDLKRYILKSKASNTIDKATEKYFFYSNLLNFFKEKVRYADGTIKKRENIEYSNDTGEIAWNKEKDFATIKKVLSLPQVNIVKKTEEQTVGQNGGLFDNNIVSKKKVVDASKLIPIKSSLSPEKYGGYARPTIAYSVLVIADIEKGKGKAKKLKRIKEIVGITIQDKKKFESNPVTYLEECGYKNINSNLIIKLPKYSLFEFNDGQRRLLASSIELQKGNELILPYHLTALLYHAQRINKISEPIHKQYVEAHQNEFKELLTTIISLSKKYIQKPNVELLLQQAFDQADKDIYQLSESFISLLKLTSFGAPGAFKFLGVEISQSSVRYKPNSQFLDTTLIHQSITGLYETRIDLSKLGED

SEQ ID NO: 763 - protein, 1370 aa, Streptococcus sanguinis
MKKPYSIGLDIGTNSVGWAVVTDDYKVPAKKMRVFGDTDRSHIKKNLLGTLLFDDGNTAESRRLKRTARRRYTRRRNRILYLQEIFTESMNEIDESFFHRLDDSFLVPEDKRGSKYPIFATLQEEKEYHKQFPTIYHLRKQLADSKEKSDVRLIYLALAHMIKYRGHFLYEETFDIKNNDIQKIFNEFINIYDNTFEGSSLSGQNAQVEAIFTDKISKSAKRERVLKLFPDEKSTGLFSEFLKLIVGNQADFKKHFDLEEKAPLQFSKDTYDEELENLLGQIGDDFADLFLIAKKLYDAILLSGILTVTDPSTKAPLSASMIERYENHQKDLAALKQFIKNNLPEKYVEVFSDQSKDGYAGYIDGKTTQEAFYKYIKNLLSKFEGADYFLDKIEREDFLRKQRTFDNGSIPHQIHLQEMNAILRRQGEHYPFLKENREKIEKILTFRIPYYVGPLARDNRDFSWLTRNSDEPIRPWNFEEVVDKARSAEDFIHRMTNYDLYLPEEKVLPKHSLLYETFAVYNELTKVKFIAEGLRDYQFLDSGQKKQIVNQLFKEKRKVTEKDIIHYLHNVDGYDGIELKGIEKQFNANLSTYHDLLKITKDKEFMDDPKNEEILENIVHTLTIFEDREMIKQRLAQYDTLFDEKVIKALTRRHYTGWGKLSAKLINGIRDKQSGKTILDYLIDDDKINRNFMQLINDDGLSFKEIIQKAQVVGKTDDVKQVVQELPGSPAIKKGILQSIKIVDELVKVMGYALESIVIEMARENQTTARGKKNSQQRYKRIEDALKNLAPGLDSNILKENPTDNIQLKNDRLFLYYLQNGKDMYTGKPLDINQLSSYDIDHIIPQAFIKDDSIDNRVLTSSKDNRGKSDNVPSLEVVQKRKAFWQQLLDSKLISERKFNNLTKAERGGLDERDKVGFIRRQLVETQQITKNVAQILDARFNTEVKEKNQKIRTVKIITLKSNLVSNFRKEFGLYKVREINNYHHAHDAYLNAVVAKAILKKYPKLEPEFVYGDYQKYDLKKYISRFKPSKEIEKATEKYFFYSNLLNFFKEEVLYADGTIRKRENIEYSKDTGEIAWDKEKDFATIKKVLSYPQVNIVKKREVQTGGFSKESILPKGNSDKLIPRKTKDILWDTTKYGGFDSPVIAYSILLIADIEKGKAKKLKTVKTLVGITIMEKAAFEENPITFLENKGYHNVRKENILCLPKYSLFELENGRRRLLASAKELQKGNEIVLPVCLTTLLYHSKNLHKLDEPEHLEYIQKHRNEFKDLLNLVSEFSQKYILAEANLEKIKDLYADNEQADIEILANSFINLLTFTALGAPAAFKFFGKDVDRKRYTTVSEILNATLIHQSITGLYETRIDLSKLGEE

SEQ ID NO: 764 - protein, 1421 aa, Streptococcus sanguinis
MTKFNKNYSIGLDIGVSSVGYAVVTEDYRVPAFKFKVLGNTEKEKIKKNLIGSTTFVSAQPAKGTRVFRVNRRRIDRRNHRITYLRDIFQKEIEKVDKNFYRRLDESFRVLGDKSEDLQIKQPFFGDKELETAYHKKYPTIYHLRKHLADADKNSPVADIREVYMAISHILKYRGHFLTLDKINPNNINMQNSWIDFIESCQEVFDLEISDESKNIADIFKSSENRQEKVKKILPYFQQELLKKDKSIFKQLLQLLFGLKTKFKDCFELEEEPDLNFSKENYDENLENFLGSLEEDFSDVFAKLKVLRDTILLSGMLTYTGATHARFSATMVERYEEHRKDLQRFKFFIKQNLSEQDYLDIFGRKTQNGFDVDKETKGYVGYITNKMVLTNPQKQKTIQQNFYDYISGKITGIEGAEYFLNKISDGTFLRKLRTSDNGAIPNQIHAYELEKIIERQGKDYPFLLENKDKLLSILTFKIPYYVGPLAKGSNSRFAWIKRATSSDILDDNDEDTRNGKIRPWNYQKLINMDETRDAFITNLIGNDIILLNEKVLPKRSLIYEEVMLQNELTRVKYKDKYGKAHFFDSELRQNIINGLFKNNSKRVNAKSLIKYLSDNHKDLNAIEIVSGVEKGKSFNSTLKTYNDLKTIFSEELLDSEIYQKELEEIIKVITVFDDKKSIKNYLTKFFGHLEILDEEKINQLSKLRYSGWGRYSAKLLLDIRDEDTGFNLLQFLRNDEENRNLTKLISDNTLSFEPKIKDIQSKSTIEDDIFDEIKKLAGSPAIKRGILNSIKIVDELVQIIGYPPHNIVIEMARENMTTEEGQKKAKTRKTKLESALKNIENSLLENGKVPHSDEQLQSEKLYLYYLQNGKDMYTLDKTGSPAPLYLDQLDQYEVDHIIPYSFLPIDSIDNKVLTHRENNQQKLNNIPDKETVANMKPFWEKLYNAKLISQTKYQRLTTSERTPDGVLTESMKAGFIERQLVETRQIIKHVARILDNRFSDTKIITLKSQLITNFRNTFHIAKIRELNDYHHAHDAYLAVVVGQTLLKVYPKLAPELIYGHHAHFNRHEENKATLRKHLYSNIMRFFNNPDSKVSKDIWDCNRDLPIIKDVIYNSQINFVKRTMIKKGAFYNQNPVGKFNKQLAANNRYPLKTKALCLDTSIYGGYGPMNSALSIIIIAERFNEKKGKIETVKEFHDIFIIDYEKFNNNPFQFLNDTSENGFLKKNNINRVLGFYRIPKYSLMQKIDGTRMLFESKSNLHKATQFKLTKTQNELFFHMKRLLTKSNLMDLKSKSAIKESQNFILKHKEEFDNISNQLSAFSQKMLGNTTSLKNLIKGYNERKIKEIDIRDETIKYFYDNFIKMFSFVKSGAPKDINDFFDNKCTVARMRPKPDKKLLNATLIHQSITGLYETRIDLSKLGED

SEQ ID NO: 765 - protein, 317 aa, Streptococcus sp.
FEDSILFSYQVDSKFNRKISDATIYATRKAKLDKEKSEETYVLGKIKDIYSQAGYDAFIKIYNKDKSKFLMYHKDPQTFEKVIEEILRTYPSKELNDKNKEIPCNPFEKYRQENGPIRKYSKKSNGPEIKSLKYYDNKLGNHIDITPESSDNQVVLQSLKPWRTDVYFNHQTKKYELMGLKYSDLSFEKGSGKYSISNQKYNSIKRIEGIDEQSEFKFTLYKNDLILIKDSENNEQKLFRFNSRNDTAKHYIELKPYDKAKFDGEQELITILGNVAKGGRCLKGLNKSNISIFKVKTDVLGKKHIIKKEGDEPKLKF

SEQ ID NO: 766 - protein, 1420 aa, Streptococcus sp.
MAKFNKNYSIGLDIGVSSVGYAVVTEDYRVPAFKFKVLGNTEKEKIKKNLIGSTTFVPAQSAQGTRVFRVNRRRIDRRNHRIAYLRDIFQKEIEKIDKNFYRRLDESFRVLGDKSEDIQIKQPFFGNKELETAYHKKYPTIYHLRKHLADADKNSPVADIREVYMVLSHILKYRGHFLTLGKIDPNNINMQNSWIDFIESCQDAFDLEISDESKTIAAIFKSSENRQEKVKQILSYFQQELLKKDKSIFKQLLQLLFGLKTKFKDCFELEEEPDLNFSKENYDENLENLLGALEEDFSDVFAKLKILRDTILLSSMLTYTGATHARFSATMVERYEEHRKDLQRFKSFVKQNLSEQDYLDIFGRKTPTGFDVDKETKGYVGYISNKMVLTNPQKQKTIQQNFYDYISGKITGIEGAECFLNKISDGTFLRKLRTTDNGAIPNQIHAYELEKIIERQGRDYPFLLENKDKLLSILTFKIPYYVGPLAKGNNSRFAWIKRTTSQDVLDDNDEDTRNGKIRPWNYHKLINMDETRDAFIINLIGNDIILLNEKVLPKRSLIYEEVMLQNELTRVKYKDKYGKIHFFNSELRQEIINNLFKTNSKRVSSAMLLSYLENFTNLQAVEIVSGIEKGKSLNSTLKTYNDLKTIFSEELLDSEIYQKELEEIIKVITVFDDKKSIKNYLTKYFGHLEFLNEEKINQLSKLRYTGWGRYSGKLLLGIRDEDTGFNLMQFLRNDDENRNLTQLISDTTLSFDSAIKAIQSKSTVEDDVFEEIKNLAGSPAIKRGILNSIKIVDELVQIIGYPPQNIIIEMARENMTTEEGQKKAKTRKSKLESALKNIEDSVLESGKVPHSDEQLQSEKLYLYYLQNGKDMYSLDKTGSPTPLYRDQLDQYEVDHIIPYSFLPIDSIDNKVLTHRENNQRKLNNIPDKETVANMKPFWEKLYNAKLISQTKYQRLTTSERTPDGVLTESMKAGFIERQLVETRQIIKHVARILDNRFSDTKIITLKSQLVTNFRNTFHIAKIRELNDYHHAHDAYLAVVVGQTLLKAYPKLAPELIYGHHAHFNRHEENKATLRKHLYSNIMRFFNNPDSKVSKDIWDCNRDLPIVKDVIYNSQINFVKRTMIKKGAFYNQNPVGKLNKQIAANNRYPLKTKVSSLDTSIYGGYGPMNSALSIIIIAERFNEKKGKIETVKEFHDIFIIDYEKFNNNPFQFLNNVSEEGFLKKNDLNRVLAFYRISKYSLMQKIDGTRMLFESKSNLHKVTQFKLTKTQNELFFHMKRLLTKSNLMDLKSESAIKESQNFIQTHQNEFDNIADRLSNYSQKMLGETKSLQTLINGYNERPIKQIDNNEETIRYYYDNFIKMFSFVKSGAPKDIINFFNDKYTVPRMRPKPDRKMLDATLIHQSITGLYETRIDLSKLGED

SEQ ID NO: 767 - protein, 1371 aa, Streptococcus sp.
MENKNYSIGLDIGTNSVGWSVITDDYKVPSKKMKVLGNTDKHFIKKNLIGALLFDEGTTAEARRLKRTARRRYTRRKNRLRYLQEIFSEEIGKVDSSFFHRLDDSFLIPEDKRGSKYPIFATLAEEKKYHKQFPTIYHLRKQLADSKEKTDLRLIYLALAHMIKYRGHFLYEEAFDIKNNDIQKIFNEFISIYNNTFEGNSLSGQNVQVEAIFTDKISKSAKRERVLKLFPDEKSTGLFSEFLKLIVGNQADFKKHFDLEEKAPLQFSRDTYDEDLENLLGQIGDDFADLFLVAKKLYDAILLSGILTVTNPSTKAPLSASMIERYENHQKDLASLKQFIKNNLPEKYDEVFSDQSEDGYAGYIDGKTTQETFYKYIKNLLSKFEGADYFLDKIEREDFLRKQRTFDNGSIPHQIHLQEMNAILRRQGEHYPFLKENKEKIEKILTFRIPYYVGPLARGNRDFAWLTRNSDQAIRPWNFEEIVDKASSAEDFINKMTNYDLYLPEEKVLPKHSLLYETFAVYNELTKVKFIAEGLRDYQFLDSGQKKQIVTQLFKEKRKVTEKDIIQFLHNVDGYDGIELKGIEKQFNASLSTYHDLLKIIKDKAFMDDAKNEAILENIVHTLTIFEDREMIKQRLAQYDSLFDEKVIKALTRRHYTGWGKLSAKLINGISDKQTGNTILDYLIDDGEINRNFMQLINDDGLSFKEIIQKAQVVGKTNDVKQVVQELPGSPAIKKGILQSIKIVDELVKVMGHAPESIVIEMARENQTTARGKKNSQQRYKRIEDSLKILASGLNSKILKEHPTDNIQLQNDRLFLYYLQNGKDMYTGEALDINQLSSCDIDHIIPQAFIKDDSLDNRVLTSSKDNRGKSDNVPSLEVVDKMKVFWQQLLDSKLISYRKFNNLTKAERGGLNELDKVGFIKRQLVETRQITKHVAQILDARFNKEVTEKDKKNRTVKIITLKSNLVSNFRKEFELYKVREINDYHHAHDAYLNAVVAKAILKKYPKLEPEFVYGDYQKYDLKRYISRSKDPKEIEKATEKYFFYSNLLNFFKEEVHYADGTIVKRENIEYSKDTGEIAWNKEKDFATIKKVLSLPQVNIVKKREVQTGGFSKESILPKGNSDKLIPRKTKDILWDTTKYGGFDSPVIAYSILLIADIEKGKAKKLKTVKTLVGITIMEKDAFEKNPIAFLENKGYHNVCKENILCLPKYSLFELENGRRRLLASAKELQKCNEIVLPVYLTTLLYHSKNVHKLDEPGHLEYIQKHRNEFKDLLNLVSEFSQKYVLADANLEKIKNLYADNEQADIEILANSFINLLTFTALGAPAAFKFFGKDVDRKRYTTVSEILNATLIHQSITGLYETRIDLSKLGED

SEQ ID NO: 768 - protein, 93 aa, Streptococcus sp.
MILIKDSENNEQKLFRFNSRNDTAKHYVELKPYDKARFDGQQELITILGNVAKGGQCLKGLNKSNISIFKVKTDVLGKKHIIKKEGDEPKLKF

SEQ ID NO: 769 - protein, 1121 aa, Streptococcus sp.
MNGLVLGLDIGIASVGVGILEKNSGKIIHANSRLFPAATADNNVERRKNRQARRLHRRKKHRGVRFQDLFEDYGLLTDFSKVSINLNPYRLRVDGLNQQLTNEELFIALKNIVKRRGISYLDDASEDGGTVSSDYGKAVEENRKLLAEQTPGQIQLERFEKYGQVRGDFTVVENGEKRRLINVFSTSAYRKEAERILRKQQEFNSKITDEFIEDCLKILTGKRKYYHGPGNEKSRTDYGRFRTDGTTLDNIFGILIGKCTFYPDEYRASKASYTAQEFNLLNDLNNLTVPTETKKLSEEQKKVIVEYAKEAKTLGASTLLKYIAKMIDASVDQIRGYRVDVNNKPEIHTFEAYRKMQSLETISVGELSRNVLDELAHILTLNTEREGIEEAINTKLKDSFSQDQVLELVQFRKNNSSLFSKGWHNFSLKLMMELIPELYETSEEQMTILTRLGKQKSKEISKRTKYIDEKELTEEIYNPVVAKSVRQAIKIINEATKKHGIFDNIVIEMARENNEEDAKKDYIKRQKANQDEKNAAMEKAAFQYNGKKELPDSIFHGQKELATKIRLWHQQGEKCLYTGKNIPISDLIHNQYKYEIDHILPLSLSFDDSLSNKVLVLATANQEKGQRTPFQALDSMDDAWSYREFKSYVKESKLLGNKKKEYLLTEEDISKIEVKQKFIERNLIDTRYSSRVVLNALQDFYKAHKFDTTISVVRGQFTSQLRRKWGLEKSRETYHHHAVDALIIAASSQLRLWKKQNNPLIAYKEGQFVDSETGEIISLSDDEYKELVFKAPYDHFVDTLSSKTFEDSILFSYQVDSKFNRKISDATIYATRKAKLDKEKSEETYVLGKIKDIYSQAGYDAFIKIYNKDKSKFLMYHKDPQTFEKVIEEILRTYPSKELNDKNKEIPCNPFEKYRQENGPIRKYSKKSNGPEIKSLKYYDNKLGNHIDITPESSDNQVVLQSLKPWRTDVYFNHQTKKYELMGLKYSDLSFEKGSGKYSISNQKYNSIKRIEGIDEQSEFKFTLYKNDLILIKDSENNEQKLFRFNSRNDTAKHYIELKPYDKAKFDGEQELITILGNVAKGGRCLKGLNKSNISIFKVKTDVLGKKHIIKKEGDEPKLKF

SEQ ID NO: 770 - protein, 1026 aa, Streptococcus sp.
MNGLVLGLDIGIASVGVGILEKNSGKIIHANSRLFPAATADNNVERRKNRQARRLNRRKKHRGVRFQDLFEDYGLLTDFSKVSINLNPYRLRVDGLNQQLTNEELFIALKNIVKRRGISYLDDASEDGGAVSSDYGKAVEENRKLLAEQTPGQIQLERFEKYGQVRGDFTVVENGEKRRLINVFSTSAYRKEAEKILRKQQEFNNQITDEFIEDYLKILTGKRKYYHGPGNEKSRTDYGRFRTDGTTLDNIFGVLIGKCTFYPNEYRASKSSYTAQEFNLLNDLNNLTVPTETKKLSEEQKKVIVEYAKEAKTLGASTLLKYIVKMIDASVDQISGYRVDVNNKPEMHTFEVYRKMQSLETISVGELSRNVLDELAHILTLNTEREGIEEAINSKLMGVFSQDQVLELVQFRKNNSSLFSKGWHNFSLKLMMELIPELYETSEEQMTILTRLGKQKSKETSKRTKYIDEKELTEEIYNPVVAKSVRQAIKIINEATKKHGIFDNIVIEMARENNEEDAKKDYIKRQKANQDEKNAAMEKAAFQYNGKKELPGNIFNGHKELATKIRLWHQQGEKCLYTGKTIPISDLIHNQYKYEIDHILPLSLSFDDSLSNKVLVHATANQEKGQRTPFQALDSMDDAWSYREFKSYVKDLKSLSNKKKDYLLTEEDISKIEVKQKFIERNLVDTRYSSRVVLNALQDFYKSHQFDTTISVVRGQFTSQLRRKWGLEKSRETYHHHAVDALIIAASSQLRLWKKQNNPLITYKEGQFIDSQTGEIISLTDDEYKELVFKAPYDHFVDTLHSKTFEDGILFSYQVDSKYNRKISDATIYATRKAKLDKDKSEETYVLGKIKDIYSQAGYDAFIKIYNKDKRKFLMYHKDPQTFEKVIEEILRTYPSKERNDKNKEVPCNPFEKYRQENGPIRKYSKKGNGPEIKCLKYYDNKLGNYIDISPDGSDNQVVLQSLKPWRTDVYFNHQTKKYELMGLKYSDLSFEKGSGKYSISNEKYNSIKRIEGVNEQSEFKFTLYK

SEQ ID NO: 771 - protein, 1377 aa, Streptococcus sp.
MNNKPYSIGLDIGTNSVGWSVITDDYKVPSKKMKVLGNTDKRFIKKNLIGALLFDEGTTAEARRLKRTARRRYTRRKNRLRYLQEIFAEEMSKVDSSFFHRLDDSFLIPEDKRGSKYPIFATLVEEKEYHKQFPTIYHLRKQLADSKEKADLRLIYLVLAHMIKYRGHFLYEEAFDIKNNDIQKIFNEFISIYDNTFEGSSLSGQNAQVETIFTDKISKSAKRERVLKLFPDEKSTGLFSEFLKLIVGNQADFKKHFDLEEKAPLQFSKDTYDEDLENLLEQIGDDFADLFVAAKKLYDAILLSGILTVTDPSTKAPLSASMIERYENHQKDLAVLKQFIKTNLPEKYVEVFSDQSKDGYAGYIDGKTTQEAFYKYIKNLLSKFDGADYFLDKIEREVFLRKQRTFDNGSIPHQIHLQEMNTILRRQGEHYPFLKENKEKIEKILTFRIPYHVGPLARGNRDFAWLTRNSDQAIRPWNFEEIVDKASSAEDFINKMTNYDLYLPEEKVLPKHSLLYETFAVYNELTKVKFIAEGMRDYQFLDSGQKKKIINQLFKKKRKVTEDDIIDCLQKIDNYDGIELKGIEKQFNASLSTYHDILKIIRDKEFMDDPKNGDILENVIHTLTIFEDREMIKQRLAQYNSIFDEKVIKALSRKHYTGWGKLSAKLIDGIRDKQTGKTILDYLMDDGKSNRNFMQLIKDDELSFTEIIQKAQVVGDTDNLRQVVQNLPGSPAIKKGILQSIKIVDELVKVMGHAPESIVIEMARENQTTARGKKNSQQRYKRIEDSLKNLASGLDSNILKENPTDNIQLQNDRLFLYYLQNGKDMYTGEALNINQLSSYDIDHIIPQAFIKDDSLDNRVLTSSKDNRGKSDNVPSLEVVEKMKAFWQQLLDSKLISERKYNNLTKAERERGGLNELDKVGFIKRQLVETRQITKHVAQILDARFNKEVTEKNKKNRNVKIITLKSNMVSNFRKEFGLYKVREINDYHHAHDAYLNAVVAKAILKKYPKLEPEFVYGDYQKYDLKRYISRSKDPKEVEKATEKYFFYSNLLNFFKEEVHYADGTIVKRENIEYSKDTGEIAWNKEKDFATIKKVLSLPQVNIVKKTEEQTVGQNGGLFDNNIVSKKKVVDASKLIPIKSGLSPEKYGGYARPTIAYSVLVTYKQNNKIKNTMVGIPVLTKLEFERDPNLYLRNLGINNVSHVIKLVKYTVLEFKHKYGTYRRFIVSNQELKRANQIFVTTKQMKLISQYTTLDKNEHDSLLKNNQQLIQSIWNQFLEFMLATDLVNKKQYDELILTNNQTIEECRNIMNRVITTLSFTNINAGQKKIIFDDTLSLPIKRWQFTDSDKMVKKIIESTLIHQSITGLYETRIDLSKLGED

SEQ ID NO: 772 - protein, 1371 aa, Streptococcus sp.
MNNNNYSIGLDIGTNSVGWAVITDDYKVPSKKMRVLGNTDKRFIKKNLIGALLFDEGTTAEDRRLKRTARRRYTRRKNRLRYLQEIFAEEMSKVDSSFFHRLDDSFLVPEDKSGSKYPIFATLAEEKEYHKKFPTIYHLRKHLADSKEKADLRLIYLALAHITKYRGHFLYEEAFDIKNNDIQKIFNEFINIYDNTFEGSSLSGQNAQVEAIFTGKISKSVKREHVLKLFPDEKSTGLFSEFLKLIVGNQADFKKHFDLEEKASLQFSKDTYDEDLENLLGQIGDDFADLFLVAKKLYDAILLSGILTVTDPSTKAPLSASMIERYENHQEDLAALKQFIKNNLPEKYAEVFSDQSKDGYAGYIDGKTTQEAFYKYIKNLLSKFEGADYFLDKIEREDFLRKQRTFDNGSIPHQIHLQEMNAILRRQGEHYPLLKENKEKIEKILTFRIPYYVGPLARGNRDFAWLTRNSDQAIRPWNFEEIVDKASSAESFINKMTNYDLYLPEEKVLPKHSLLYETFAVYNELTKVKFIAEGLRDYQFFDSGQKKQIVNQLFKEKRKVTEKDIIHYLHNVDGYDGIELKGIEKQFNASLSTYHDLLKIIKDKEFMDNHKNQEILENIVHTLTIFEDREMIKQRLAQYDSIFDEKVIKALTRRHYTGWGKLSAKLINGICDKKTGKTILDYLIDDGYNNRNFMQLINDDGLSFKEIIQKAQVVGKTDDLTQVVRELSGSPAIKKGILQSIKIVDELVKIMGYAPESIVIEMARENQTTAKGKKNSQQRYKRIEDALKNLAPGLDSTISKENPTDNIQLQNDRLFLYYLQNGKDMYTGEALDINQLSSYDIDHIIPQAFIKDDSLDNRVLTSSKDNRGKSDNVPSLEVVKKRKAFWQQLLDSKLISERKFNNLTKAERGGLDERDKVGFIKRQLVETRQITKHVARILDARFNTEVSEKNQKIRSVKIITLKSNLVSNFRKEFKLYKVREINDYHHAHDAYLNAVVAKAILKKYPKLEPEFVYGDYQKYDLKRYISKSKDPKEVEKATEKYFFYSNLLNFFKEEVHYADGTIVKRENIEYSKDTGEIAWNKEKDFVTIKKVLSYPQVNIVKKREVQTGGFSKESILPKGNSDKLIPRKTKDILWDTTKYGGFDSPVIAYSILLIADIEKGKAKKLKTVKTLVGITIMEKAAFEKNPITFLENKGYHNVRKENILCLPKYSLFELENGRRRLLASAKELQKGNEIVLPVYLTTLLYHSKNVHKLDEPEHLEYIQKHRYEFKDLLNLVSEFSQKYVLAEANLEKIKSLYVDNEQADIEILANSFINLLTFTALGAPAAFKFFGKDVDRKRYTTVSEILNATLIHQSITGLYETRIDLSKLGED

SEQ ID NO: 773 - protein, 1139 aa, Streptococcus sp.
MSDLVLGLDIGIGSVGVGILNKVTGEIIHKNSRIFPAAQAENNLERRTNRQGRRLTRRKKHRRVRLNHLFEESGLITDFTKVSINLNPYQLRVKGLTAELSNEELFIALKNMVKHRGISYLDDASDDGNSSVGDYAQIVKENSKQLETKTPGQIQLERYQKYGQLRGDFTVEEDGRKHRLINVFPTSAYHAEALRILQTQQEFNPQITDEFINSYLEILTGKRKYYHGPGNEKSRTDYGKYTTKKDAQGQYITLNNIFGILIGKCTFYPEEYRAAKASYTAQEFNLLNDLNNLTVPTETKKLSEEQKYQIITYVKNEKAMGPAKLFKYIAKLLSCDVADIKGYRIDKSDKAEIHTFEAYRKMKTLETLDVKKMAREELDKLAYVLTLNTEREGIQEALDHEFADGTFSQEQVDELVQFRKANSSIFGKGWHSFSVKLMMELIPELYATSEEQMTILTRLGKQKTTSSSNKTKYIDEKQLTEEIYNPVVAKSVRQAIKIVNAAIKKYGDFDNIVIEMARETNEDDEKKAIQKIQKANKAEKDAAMRKAANQYNGKAELPHSVFHGHKQLATKIRLWHQQGERCLYTGKTISIHDLINNPNQFEIDHILPLSITFDDSLANKVLVYATANQEKGQRTPYQALDSMDDAWSFRELKAFVRESKALSNKKKEYLLTEEDISKFDVRKKFIERNLVDTRYASRVVLNALQEHFRTHKIDTKVSVVRGQFTSQLRRHWGIEKTRDTYHHHAVDALIIAASSQLNLWKKQKNTLVSYSEDQLLDIETGELISDDEYKESVFKAPYQHFVDTLKSKEFEDSILFSYQVDSKFNRKISDATIYATRKAKLDKEKKEYTYTLGKIKDIYALGTKTPSKTGFYKFLDLYKKDKSQFLMYQKDRRTWDEVIEKILEQYRPFKEKDKNGKEVDFNPFEKYRIENGPIRKYSRKGNGPEIKSLKYYDNLLGRFVDITPSESKNPVALLSLNPWRTDVYYNTETRKYEFLGLKYADLCFEKGGSYGISKVKYNKIREKEGIGKNSEFKFTLYKNDLILIKDTETNRQQIFRFWSRTGKDNPKSFEKHKLELKPYEKTRFEKGEELKVLGKVPPSSNRLQKNMQIENLSIYKVRTDVLGNQHIIKNEGDKPKLDF

SEQ ID NO: 774 - protein, 1375 aa, Streptococcus sp.
MSNKSYSIGLDIGTNSVGWAVITDDYKVPSKKMKVLGNTDKHFIKKNLIGALLFDEGTTAEDRRLKRTARRRYTRRKNRLRYLQEIFSQEISKVDSSFFHRLDDFFLVPEDKRGSKYPIFATLVEEKEYHKKFPTIYHLRKHLADSKEKTDLRLIYLALAHMIKYRGHFLYEESFDIKNNDIQKIFSEFISIYDNTFEGKSLSGQNAQVEAIFTDKISKSTKRERVLKLFPDEKSTGLFSEFLKLIVGNQADFKKHFDLEEKAPLQFSKDTYDEDLENLLGQIGDDFADLFLVAKKLYDAILLSGILTVKDLSTKAPLSASMIERYENHQKDLAALKQFIQNNLQEKYDEVFSDQSKDGYAGYIDGKTTQEAFYKYIKNLLSKFEGADYFLDKIEREDFLKKQRTFDNGSIPHQIHLQEMNAIIRRQGEHYPFLQENKEKIEKILTFRIPYYVGPLARGNGDFAWLTRNSDQAIRPWNFEEIVDQASSAEDFINKMTNYDLYLPEEKVLPKHSLLYETFAVYNELTKVKFIAEGLTRYQFLDKKQKKDIFDTFFKAENKRKVTEKDIIHYLHNVDGYDGIELKGIEKQFNASLSTYHDLLKIIKDKAFMDDSKNEEILENIIHTLTIFEDREMIKQRLAQYDSLFDEKVIKALTRRHYTGWGKLSAKLINGIRDKKSGKTILDYLIDDGEINRNFMQLIHDDGLSFKEIIQKAQVFGKTNDVKQVVQELPGSPAIKKGILQSIKIVDELVKVMGHAPESIVIEMARENQTTARGKKNSQQRYKRIEDSLKNLASGLDSNILKENPTDNIQLQNDRLFLYYLQNGRDMYTGKPLEINQLSNYDIDHIIPQAFIKDDSLDNRVLTSSKDNRGKSDNVPSLEVVEKMKAFWQQLLDSKLISERKFNNLTKAERERGGLNELDKVGFIKRQLVETRQITKHVAQFLDARFNKEVTEKDKKNRNVKIITLKSNLVSNFRKEFGLYKVREINDYHHAHDAYLNAVLAKAILKKYPKLEPEFVYGDYQKYDLQRYISKSREPKEVEKATQKYFFYSNLLNFFKEEVHYADGTIVKRENIEYSKDTGEIAWNKEKDFATVKKVLSLPQVNIVKKTEVQTGGFSKESILPKGNSDKLIPRKTKEILWDTTKYGGFDSPVIAYSILLIADIEKGKAKKLKTVKTLVGITIMEKATFEKNPITFLENKGYHNVRKENILCLPKYSLFELESGRRRMLASAKELQKGNEIVLPVYLTTLLYHSKNVHKLDEPEHLEYIQKHRYEFKDLLNLVSEFSQKYVLADANLEKIKNLYADNEQADIEILANSFINLLTFTALGAPAAFKFLGKDVDRKRYTTVSEILNATLIHQSITGLYETRIDLSKLGED

SEQ ID NO: 775 - protein, 206 aa, Streptococcus sp.
RTPFQALDSMDDAWSYREFKSYVKESKLLGNKKKEYLLTEEDISKIEVKQKFIERNLIDTRYSSRVVLNALQDFYKAHKFDTTISVVRGQFTSQLRRKWGLEKSRETYHHHAVDALIIAASSQLRLWKKQNNPLIAYKEGQFVDSETGEIISLSDDEYKELVFKAPYDHFVDTLSSKTFEDSILFSYQVDSKFNRKISDATIYATR

SEQ ID NO: 776 - protein, 1122 aa, Streptococcus suis
MSNGKILGLDIGIASVGVGVIDAQTGEIIHASSRIFPSANAANNAERRTFRGSRRLIRRKKHRIKRLDDLFNDFHINLDGEMSTDNPYVLRVKGLSQKLTVEELYISIKNIMKRRGISYLDDAESDNEAGRSDYAKAIERNRQLLTSKTPGEIQLERLEKYGQLRGNFTIIDEEGQSQQIINVFSTSDYVKEVEKILDCQKMYHKFISDEFCDKLIELLREKRKYYVGPGNEKSRTDYGIYRTDGTTLENLFGILIGKCTFYPDQYRSSRASYTAQEFNFLNDLNNLTVPTETKKLSQEQKEFLVNYAKETSVLGAGKILQQIAKLADCKVEDIRGYRLDNKDKPELHTFETYRAMKGLVPLVDIGVLSREQLDILADILTLNTDFEGIREALKKQLPNVFDEKQVKGLASFRKSKSQLFAKGWHNLSQKIMLEVIPELYATSDEQMTILTRLGKFEKSSVAEYPSSINVDEITDEIYNPVVAKSIRQTIKIINASIKKWDEFDQIVIEMPRDRNEDEEKKRIADGQKANAKEKADSILRAAELYCAGKVLPDYVYNGHNQLATKIRLWYQQGERCIYTGQPISIHDLIHNQNQYEIDHILPLSLTFDDSLSNKVLVLATANQEKAQRTPYNYLKSATSAWSYREFKDYVTKRKGIGKKKCEYLTFEEDINGFEVRSKFIQRNLVDTRYASKVILNALQDYFKISGIQTKVSVVRGQFTSQLRHKWGIEKTRETYHHHAVDALIIAASSQLRLWKKQESPLVVDYQEGRQVDLETGEILELTDEQYKELVYQPPYQGFVNTISSSAFDNEILFSYQVDSKVNRKISDATIYATRNAQLGKDKTEGIYVLGKIKDIYTQAGYEAFLKRYTKDKTSFLMYHKDLDTWEKVIEIILRDYREYDEKGKEIGNPFERYRRENGYVKKYSRKGNGTAIKSLKYYDNKLGNHIDITPENSRNAVVLQSLKPWRTDVYFNKETGKYEFLGIKYSDLSFEKGTGEYGISQEKYDSIKIAEGVAKKSIFKFTLYKQDLLFIKDIENNFGKLLRFTSKNDTSKHYVELKPYDKNKFGTEEPLLPVLGNVAKSGQCIKGLNKSNISIYKVRTDILGYRHFIKQEGEHPQLKFKK

SEQ ID NO: 777 - protein, 1381 aa, Streptococcus suis
MVKKKYAIGIDIGTNSVGWSIVTDDYKVPSKKMKVFGNTEKRYIKKNLLGTLLFDEGNTAENRRLKRTARRRYTRRRNRILYLQEIFAEEINKIDDSFFQRLDDSFLIVEDKQGSKHPIFGTLQEEKEYHKQFPTIYHLRKQLADSSQKADIRLIYLALAHIIKYRGHFLFEGDLKSENKDVQHLFNDFVEMFDKTVEGSYLSENLPNVADVLVEKVSKSRRLENILHYFPNEKKNGLFGNFLALALGLQPNFKTNFELAEDAKIQFSKETYEEDLEELLGKIGDDYADLFIATKSLYDGILLAGILSTTDSTTKAPLSSSMVNRYEEHQKDLALLKNFIHQNLSDSYKEVFNDKLKDGYAGYIEGKTTQENFYRFIKKAIEKIEGSNYFIDKIDREDFLRKQRTFDNGSIPHQIHLQEMHAIIRRQAEFYPFLVENQDKIEKILTFRIPYYVGPLARGKSEFAWLNRKSDEKIRPWNFDEMVDKETSAENFITRMTNYDRYLPDQKVLPKHSLLYEKFAVYNELTKVKFIAEGMRDYQFLDSGQKKDIVKTLFKTKRKVTAKDIKAYLENSNGYAGVELKGLEEQFNASLPTYHDLLKILRDKAFIDAEENQEILEDIVLTLTLFEDREMIRKRLEKYKDILTEEQRKKLERRHYTGWGRLSAKLINGILDKVTRKTILGYLIDDGTSNRNFMQLINDDTLSFVDEIRLAQGSGEAEDYRAEVQNLAGSPAIKKGILQSLKIVDELIEVMGYEPEHIVVEMARENQFTNQGRRNSQQRINRLENALKDFGSKILEEQKPYGVSKVNNIHLQSDRLFLYYLQNGKDMYTDEELDIDHLSEYDIDHIIPQAFIKDDSLDNKVLTKSAKNRGKSDDVPSMEIVHNRKNFWRQLLKSKLISQRKFDNLTKAERGGLTNEDKARFIQRQLVETRQITKHVARMLDTRFNTKLDEAGNRIRDPKVNIITLKSNLVSQFRKDYQLYKIREINNYHHAHDAYINAVVATALLKKYPQLAPEFVYGEYPTYNSYNSRKSATEKVLFYSNIMNFFKRIVVHSKTGEVRIRPVIEVNKETGEIVWDKKSDFRTVRKVLSYPQVNVVKKTEVQNHGLDRGKPKGFYNANLSPRPKEGSVENLVPAKQSFDTKRYGGYAGISNSYAVLVNGIIEKGKKKSKAEVTEFQGISILARKDFDKNPKQYLLNLGYKDIKSIIKLPKYSLFELENGSRRMLASILSTNNKRGEIHKGNEMYLPDKFVTLLYHAMRVNRTLEPGHKKYVETHRHVFDELLIYILEYNEKIVGAKANGKRIVEAYSARKDTDNLEELCNSFINLLNLTALGSAVDFEFLGTKIPRYRDYTPSSLLKATLIHQSVTGLYETRIDLSKLGGD

SEQ ID NO: 778 - protein, 39 aa, Streptococcus thermophilus
GRCIKGLGKSNISIYKVRTDVLGNQHIIKNEGDKPKLDF

SEQ ID NO: 779 - protein, 302 aa, Streptococcus thermophilus
MIRRKKHRIVRLNRLFEESGLITDFTKISINLNPYQLRVKGLTDELSNEELFIALKNMVKHRGISYLDDASDDGNSSVGDYAQIVKENSKQLETKTPGQIQLERYQTYGQLRGDFTVEKDGKKHRLINVFPTSAYRSEALRILQTQQEFNPQITDEFINRYLEILTGKRKYYHGPGNEKSRTDYGRYRTSGETLDNIFGILIGKCTFYPDEFRAAKASYTAQEFNLLNDLNNLTVPTETKKLSKEQKNQIINYVKNEKAMGPAKLFKYIAKLLSCDVADIKGYRIDKSGKAERFILSKPIEK

SEQ ID NO: 780 - protein, 1121 aa, Streptococcus thermophilus
MSDLVLGLDIGIGSVGVGILNKVTGEIIHKNSRIFPAAQAENNLVRRTNRQGRRLTRRKKHRIVRLNRLFEESGLITDFTKISINLNPYQLRVKGLTDELSNEELFIALKNMVKHRGISYLDDASDDGNSSVGDYAQIVKENSKQLETKTPGQIQLERYQTYGQLRGDFTVEKDGKKHRLINVFPTSAYRSEALRILQTQQEFNPQITDEFINRYLEILTGKRKYYHGPGNEKSRTDYGRYRTSGETLDNIFGILIGKCTFYPDEFRAAKASYTAQEFNLLNDLNNLTVPTETKKLSKEQKNQIINYVKNEKAMGPAKLFKYIAKLLSCDVADIKGYRIDKSGKAEIHTFEAYRKMKTLETLDIEQMDRETLDKLAYVLTLNTEREGIQEALEHEFADGSFSQKQVDELVQFRKANSSIFGKGWHNFSVKLMMELIPELYETSEEQMTILTRLGKQKTTSSSNKTKYIDEKLLTEEIYNPVVAKSVRQAIKIVNAAIKEYGDFDNIVIEMARETNEDDEKKAIQKIQKANKDEKDAAMLKAANQYNGKAELPHSVFHGHKQLATKIRLWHQQGERCLYTGKTISIHDLINNSNQFEVDHILPLSITFDDSLANKVLVYATANQEKGQRTPYQALDSMDDAWSFRELKAFVRESKTLSNKKKEYLLTEEDISKFDVRKKFIERNLVDTRYASRVVLNALQEHFRAHKIDTKVSVVRGQFTSQLRRHWGIEKTRDTYHHHAVDALIIAASSQLNLWKKQKNTLVSYSEDQLLDIETGELISDDEYKESVFKAPYQHFVDTLKSKEFEDSILFSYQVDSKFNRKISDATIYATRQAKVGKDKADETYVLGKIKDIYTQDGYDAFMKIYKKDKSKFLMYRHDPQTFEKVIEPILENYPNKQMNEKGKEVPCNPFLKYKEEHGYIRKYSKKGNGPEIKSLKYYDSKLGNHIDITPKDSNNKVVLQSVSPWRADIYFNNTTGKYEILGLKYADLQFEKGTGTYKISQEKYNDIKKKEGVDSDSEFKFTLYKNDLLLVKETETKEQQLFRFLSRTMPKQKHYVELKPYDKQKFEGGEALIKVLGNVANGGQCIKGLGKSNISIYKVRTDVLGNQHIIKNEGDKPKLDF

SEQ ID NO: 781 - protein, 1121 aa, Streptococcus thermophilus
MSDLVLGLDIGIGSVGVGILNKVTGEIIHKNSRIFPAAQAENNLVRRTNRQGRRLTRRKKHRIVRLNRLFEESGLITDFTKISINLNPYQLRVKGLTDELSNEELFIALKNMVKHRGISYLDDASDDGNSSVGDYAQIVKENSKQLETKTPGQIQLERYQTYGQLRGDFTVEKDGKKHRLINVFPTSAYRSEALRILQTQQEFNPQITDEFINRYLEILTGKRKYYHGPGNEKSRTDYGRYRTSGETLDNIFGILIGKCTFYPDEFRAAKASYTAQEFNLLNDLNNLTVPTETKKLSKEQKNQIINYVKNEKAMGPAKLFKYIAKLLSCDVADIKEYRIDKSGKAEIHTFEAYRKMKTLETLDIEQMDRETLDKLAYVLTLNTEREGIQEALEHEFADGSFSQKQVDELVQFRKANSSIFGKGWHNFSVKLMMELIPELYETSEEQMTILTRLGKQKTTSSSNKTKYIDEKLLTEEIYNPVVAKSVRQAIKIVNAAIKEYGDFDNIVIEMARETNEDDEKKAIQKIQKANKDEKDAAMLKAANQYNGKAELPHSVFHGHKQLATKIRLWHQQGERCLYTGKTISIHDLINNSNQFEVDHILPLSITFDDSLANKVLVYATANQEKGQRTPYQALDSMDDAWSFRELKAFVRESKTLSNKKKEYLLTEEDISKFDVRKKFIERNLVDTRYASRVVLNALQEHFRAHKIDTKVSVVRGQFTSQLRRHWGIEKTRDTYHHHAVDALIIAASIQLNLWKKQKNTLVSYSEDQLLDIETGELISDDEYKESVFKAPYQHFVDTLKSKEFEDSILFSYQVDSKFNRKISDATIYATRQAKVGKDKADETYVLGKIKDIYTQDGYDAFMKIYKKDKSKFLMYRHDPQTFEKVIEPILENYPNKQINEKGKEVPVNPFLKYKEEHGYIRKYSKKGNGPEIKSLKYYDSKLGNHIDITPKDSNNKVVLQSVSPWRADVYFNKTTGKYEILGLKYADLQFEKGTGTYKISQEKYNDIKKKEGVDSDSEFKFTLYKNDLLLVKDTETKEQQLFRFLSRTMPKQKHYVELKPYDKQKFEGGEALIKVLGNVANSGQCKKGLGKSNISIYKVRTDVLGNQHIIKNEGDKPKLDF

SEQ ID NO: 782 - protein, 1121 aa, Streptococcus thermophilus
MSDLVLGLDIGIGSVGVGILNKVTGEIIHKNSRIFPAAQAENNLVRRTNRQGRRLTRRKKHRRVRLNRLFEESGLITDFTKISINLNPYQLRVKGLTDELSNEELFIALKNMVKHRGISYLDDASDDGNSSVGDYAQIVKENSKQLETKTPGQIQLERYQTYGQLRGDFTVEKDGKKHRLINVFPTSAYRSEALRILQTQQEFNPQITDEFVNRYLEILTGKRKYYHGPGNEKSRTDYGRYRTNGETLDNIFGILIGKCTFYPEEFRAAKASYTAQEFNLLNDLNNLTVPTETKKLSKEQKNQIINYVKNEKAMGPAKLFKYIAKLLSCDVADIKGYRIDKSGKAEIHTFEAYRKMKTLETLDIEQMDRETLDKLAYVLTLNTEREGIQEALEHEFADGSFSQKQVDELVQFRKANSSIFGKGWHNFSVKLMMELIPELYETSEEQMTILKRLGKQKTTSSSNKTKYIDEKLLTEEIYNPVVAKSIRQAIKIVNAAIKEYGDFDNIVIEMARETNEDDEKKAIQKIQKANKDEKDAAMLKAANQYNGKAELPHSVFHGHKQLATKIRLWHQQGERCLYTGKTISIHDLINNPNQFEVDHILPLSITFDDSLANKVLVYATANQEKGQRTPYQALDSMDDAWSFRELKAFVRESKTLSNKKKEYLLTEEDISKFDVRKKFIERNLVDTRYASRVVLNALQEHFRAHKIDTKVSVVRGQFTSQLRRHWGIEKTRDTYHHHAVDALIIAASSQLNLWKKQKNTLVSYSEDQLLDIETGELISDDEYKESVFKAPYQHFVDTLKSKEFEDSILFSYQVDSKFNRKISDATIYATRQAKVGKDKKDETYVLGKIKDIYTQDGYDAFMKIYKKDKSKFLMYRHDPQTFEKVIEPILENYPNKEMNEKGKEVPCNPFLKYKEEHGYIRKYSKKGNDPEIKSLKYYDSKLGNHIDITPKDSNNKVVLQSVSPWRADVYFNKTTGKYEILGLKYADLQFEKGTGTYKISQEKYNDIKKKEGVDSDSEFKFTLYKNDLLLVKDTETKEQQLFRFLSRTMPKQKHYVELKPYDKQKFEGGEALIKVLGNVANSGQCKKGLGKSNISIYKVRTDVLGNQHIIKNEGDKPKLDF

SEQ ID NO: 783 - protein, 1122 aa, Streptococcus thermophilus
MSDLVLGLDIGIGSVGVGILNKVTGEIIHKNSRIFPAAQAENNVERRTNRQGRRLTRRKKHRRVRLNRLFEESGLITDFTKISINLNPYQLRVRGLTDELSNEELFIALKNMVKHRGISYLDDASDDGNSSVGDYAQIVKENSKQLETKTPGQIQLERYQTYGQLRGDFTVEKDGKKHRLINVFPTSAYRSEALRILQTQQEFNSQITDEFINRYLEILTGKRKYYHGPGNEKSRTDYGRYRTSGETLDNIFGILIGKCTFYPEEFRAAKASYTAQEFNLLNDLNNLTVPTETKKLSKEQKNQIINYVKNEKAMGPAKLFKYIAKLLSCDVADIKGYRIDKSGKAEIHTFEAYRKMKTLETLDIEQMDRETLDKLAYVLTLNTEREGIQEALEHEFADGSFSQKQVDELVQFRKASSSIFGKGWHNFSVKLMMELIPELYETSEEQMTILTRLGKQKTTSSSNKTKYIDEKLLTEEIYNPVVAKSVRQAIKIVNAAIKEYGDFDNIVIEMARETNEDDEKKAIQKIQKANKDEKDAAMLKAANQYNGKAELPHSVFHGHKQLATKIRLWHQQGERCLYTGKTISIHDLINNPNQFEVDHILPLSITFDDSLANKVLVYATANQEKGQRTPYQALDSMDDAWSFRELKAFVRESKTLSNKKKEYLLTEEDISKFDVRKKFIERNLVDTRYASRVVLNALQEHFRAHKIDTKVSVVRGQFTSQLRRHWGIEKTRDTYHHHAVDALIIAASSQLNLWKKQKNTLVSYSEDQLLDIETGELISDDEYKESVFKAPYQHFVDTLKSKEFEDSILFSYQVDSKFNRKLSDATIYATRQAKVGKDKKDETYVLGKIKDIYTQDGYDAFMKIYKKDKSKFLMYRHDPQTFEKVIEPILENYPNKEMNEKGKEVPCNPFLKYKEEHGYIRKYSKKGNGPEIKSLKYYDSKLLGNPIDITPENSKNKVVLQSLKPWRADVYFNKTTGKYEILGLKYADLQFEKKTGTYKISQEKYNGIMKEEGVDSDSEFKFTLYKNDLLLVKDTETKEQQLFRFLSRTMPNVKYYVELKPYSKDKFEKNESLIEILGSADKSGRCIKGLGKSNISIYKVRTDVLGNQHIIKNEGDKPKLDF

SEQ ID NO: 784 - protein, 1388 aa, Streptococcus thermophilus
MTKPYSIGLDIGTNSVGWAVITDNYKVPSKKMKVLGNTSKKYIKKNLLGVLLFDSGITAEGRRLKRTARRRYTRRRNRILYLQEIFSTEMATLDDAFFQRLDDSFLVPDDKRDSKYPIFGNLVEEKAYHDEFPTIYHLRKYLADSTKKADLRLVYLALAHMIKYRGHFLIEGEFNSKNNDIQKNFQDFLDTYNAIFESDLSLENSKQLEEIVKDKISKLEKKDRILKLFPGEKNSGIFSEFLKLIVGNQADFRKCFNLDEKASLHFSKESYDEDLETLLGYIGDDYSDVFLKAKKLYDAILLSGFLTVTDNETEAPLSSAMIKRYNEHKEDLALLKEYIRNISLKTYNEVFKDDTKNGYAGYIDGKTNQEDFYVYLKNLLAEFEGADYFLEKIDREDFLRKQRTFDNGSIPYQIHLQEMRAILDKQAKFYPFLAKNKERIEKILTFRIPYYVGPLARGNSDFAWSIRKRNEKITPWNFEDVIDKESSAEAFINRMTSFDLYLPEEKVLPKHSLLYETFNVYNELTKVRFIAESMRDYQFLDSKQKKDIVRLYFKDKRKVTDKDIIEYLHAIYGYDGIELKGIEKQFNSSLSTYHDLLNIINDKEFLDDSSNEAIIEEIIHTLTIFEDREMIKQRLSKFENIFDKSVLKKLSRRHYTGWGKLSAKLINGIRDEKSGNTILDYLIDDGISNRNFMQLIHDDALSFKKKIQKAQIIGDEDKGNIKEVVKSLPGSPAIKKGILQSIKIVDELVKVMGGRKPESIVVEMARENQYTNQGKSNSQQRLKRLEKSLKELGSKILKENIPAKLSKIDNNALQNDRLYLYYLQNGKDMYTGDDLDIDRLSNYDIDHIIPQAFLKDNSIDNKVLVSSASNRGKSDDFPSLEVVKKRKTFWYQLLKSKLISQRKFDNLTKAERGGLLPEDKAGFIQRQLVETRQITKHVARLLDEKFNNKKDENNRAVRTVKIITLKSTLVSQFRKDFELYKVCEINDFHHAHDAYLNAVIASALLKKYPKLEPEFVYGDYPKYNSFRERKSATEKVYFYSNIMNIFKKSISLADGRVIERPLIEVNEETGESVWNKESDLATVRRVLSYPQVNVVKKVEEQNHGLDRGKPKGLFNANLSSKPKPNSNENLVGAKEYLDPKKYGGYAGISNSFAVLVKGTIEKGAKKKITNVLEFQGISILDRINYRKDKLNFLLEKGYKDIELIIELPKYSLFELSDGSRRMLASILSTNNKRGEIHKGNQIFLSQKFVKLLYHAKRISNTINENHRKYVENHKKEFEELFYYILEFNENYVGAKKNGKLLNSAFQSWQNHSIDELCSSFIGPTGSERKGLFELTSRGSAADFEFLGVKIPRYRDYTPSSLLKDATLIHQSVTGLYETRIDLAKLGEG

SEQ ID NO: 785 - protein, 1388 aa, Streptococcus thermophilus
MTKPYSIGLDIGTNSVGWAVITDNYKVPSKKMKVLGNTSKKYIKKNLLGVLLFDSGITAEGRRLKRTARRRYTRRRNRILYLQEIFSTEMATLDDAFFQRLDDSFLVPDDKRDSKYPIFGNLVEEKAYHDEFPTIYHLRKYLADSTKKADLRLVYLALAHMIKYRGHFLIEGEFNSKNNDIQKNFQDFLDTYNAIFESDLSLENSKQLEEIVKDKISKLEKKDRILKLFPGEKNSGIFSEFLKLIVGNQADFRKCFNLDEKASLHFSKESYDEDLETLLGYIGDDYSDVFLKAKKLYDAILLSGFLTVTDNETEAPLSSAMIKRYNEHKEDLALLKEYIRNISLKTYNEVFKDDTKNGYAGYIDGKTNQEDFYVYLKNLLAEFEGADYFLEKIDREDFLRKQRTFDNGSIPYQIHLQEMRAILDKQAKFYPFLAKNKERIEKILTFRIPYYVGPLARGNSDFAWSIRKRNEKITPWNFEDVIDKESSAEAFINRMTSFDLYLPEEKVLPKHSLLYETFNVYNELTKVRFIAESMRDYQFLDSKQKKDIVRLYFKDKRKVTDKDIIEYLHAIYGYDGIELKGIEKQFNSSLSTYHDLLNIINDKEFLDDSSNEAIIEEIIHTLTIFEDREMIKQRLSKFENIFDKSVLKKLSRRHYTGWGKLSAKLINGIRDEKSGNTILDYLIDDGISNRNFMQLIHDDALSFKKKIQKAQIIGDEDKGNIKEVVKSLPGSPAIKKGILQSIKIVDELVKVMGGRKPESIVVEMARENQYTNQGKSNSQQRLKRLEKSLKELGSKILKENIPAKLSKIDNNALQNDRLYLYYLQNGKDMYTGDDLDIDRLSNYDIDHIIPQAFLKDNSIDNKVLVSSASNRGKSDDFPSLEVVKKRKTFWYQLLKSKLISQRKFDNLTKAERGGLLPEDKAGFIQRQLVETRQITKHVARLLDEKFNNKKDENNRAVRTVKIITLKSTLVSQFRKDFELYKVREINDFHHAHDAYLNAVIASALLKKYPKLEPEFVYGDYPKYNSFRERKSATEKVYFYSNIMNIFKKSISLADGRVIERPLIEVNEETGESVWNKESDLATVRRVLSYPQVNVVKKVEEQNHGLDRGKPKGLFNANLSSKPKPNSNENLVGAKEYLDPKKYGGYAGISNSFAVLVKGTIEKGAKKKITNVLEFQGISILDRINYRKDKLNFLLEKGYKDIELIIELPKYSLFELSDGSRRMLASILSTNNKRGEIHKGNQIFLSQKFVKLLYHAKRISNTINENHRKYVENHKKEFEELFYYILEFNENYVGAKKNGKLLNSAFQSWQNHSIDELCSSFIGPTGSERKGLFELTSRGSAADFEFLGVKIPRYRDYTPSSLLKDATLIHQSVTGLYETRIDLAKLGEG

SEQ ID NO: 786 - protein, 595 aa, Streptococcus thermophilus
MVQFRKANSSIFGKGWHNFSVKLMMELIPELYETSEEQMTILKRLGKQKTTSSSNKTKYIDEKLLTEEIYNPVVAKSVRQAIKIVNAAIKEYGDFDNIVIEMARETNEDDEKKAIQKIQKANKDEKDAAMLKAANQYNGKAELPHSVFHGHKQLATKIRLWHQQGERCLYTGKTISIHDLINNPNQFEVDHILPLSITFDDSLANKVLVYATANQEKGQRTPYQALDSMDDAWSFRELKAFVRESKTLSNKKKEYLLTEEDISKFDVRKKFIERNLVDTRYASRVVLNALQEHFRAHKIDTKVSVVRGQFTSQLRRHWGIEKTRDTYHHHAVDALIIAASSQLNLWKKQKNTLVSYSEDQFLDIETGELISDDEYKESVFKAPYQHFVDTLKSKEFEDSILFSYQVDSKFNRKISDATIYATRKAKLDKEKKEYTYTLGKIKDIYTQAGYDAFIKIYKKDKSKFLMYHHDPQTFEKVIEPILENYPNKEINEKGKEVPCNPFLKYKEEHGYIRKYSKKGNGPEIKSFKYYDNLLGRHIDITPKNSKNIVALRKLNPWRTDVYFNHETMKYEFLGLKYADISYKKSKNKAGDFLPK

SEQ ID NO: 787 - protein, 1388 aa, Streptococcus thermophilus]
MTKPYSIGLDIGTNSVGWAVITDNYKVPSKKMKVLGNTSKKYIKKNLLGVLLFDSGITAEGRRLKRTARRRYTRRRNRILYLQEIFSTEMATLDDAFFQRLDDSFLVPDDKRDSKYPIFGNLVEEKVYHDEFPTIYHLRKYLADSTKKADLRLVYLALAHMIKYRGHFLIEGEFNSKNNDIQKNFQDFLDTYNAIFESDLSLENSKQLEEIVKDKISKLEKKDRILKLFPGEKNSGIFSEFLKLIVGNQADFRKCFNLDEKASLHFSKESYDEDLETLLGYIGDDYSDVFLKAKKLYDAILLSGFLTVTDNETEAPLSSAMIKRYNEHKEDLALLKEYIRNISLKTYNEVFKDDTKNGYAGYIDGKTNQEDFYVYLKNLLAEFEGADYFLEKIDREDFLRKQRTFDNGSIPYQIHLQEMRAILDKQAKFYPFLAKNKERIEKILTFRIPYYVGPLARGNSDFAWSIRKRNEKITPWNFEDVIDKESSAEAFINRMTSFDLYLPEEKVLPKHSLLYETFNVYNELTKVRFIAESMRDYQFLDSKQKKDIVRLYFKDKRKVTDKDIIEYLHAIYGYDGIELKGIEKQFNSSLSTYHDLLNIINDKEFLDDSSNEAIIEEIIHTLTIFEDREMIKQRLSKFENIFDKSVLKKLSRRHYTGWGKLSAKLINGIRDEKSGNTILDYLIDDGISNRNFMQLIHDDALSFKKKIQKAQIIGDEDKGNIKEVVKSLPGSPAIKKGILQSIKIVDELVKVMGGRKPESIVVEMARENQYTNQGKSNSQQRLKRLEKSLKELGSKILKENIPAKLSKIDNNALQNDRLYLYYLQNGKDMYTGDDLDIDRLSNYDIDHIIPQAFLKDNSIDNKVLVSSASNRGKSDDFPSLEVVKKRKTFWYQLLKSKLISQRKFDNLTKAERGGLLPEDKAGFIQRQLVETRQITKHVARLLDEKFNNKKDENNRAVRTVKIITLKSTLVSQFRKDFELYKVREINDFHHAHDAYLNAVIASALLKKYPKLEPEFVYGDYPKYNSFRERKSATEKVYFYSNIMNIFKKSISLADGRVIERPLIEVNEETGESVWNKESDLATVRRVLSYPQVNVVKKVEEQNHGLDRGKPKGLFNANLSSKPKPNSNENLVGAKEYLDPKKYGGYAGISNSFAVLVKGTIEKGAKKKITNVLEFQGISILDRINYRKDKLNFLLEKGYKDIELIIELPKYSLFELSDGSRRMLASILSTNNKRGEIHKGNQIFLSQKFVKLLYHAKRISNTINENHRKYVENHKKEFEELFYYILEFNENYVGAKKNGKLLNSAFQSWQNHSIDELCSSFIGPTGSERKGLFELTSRGSAADFEFLGVKIPRYRDYTPSSLLKDATLIHQSVTGLYETRIDLAKLGEG

SEQ ID NO: 788 - protein, 1038 aa, Streptococcus vestibularis
MIDELSNEELFIALKNMVKHRGISYLDDASDDGNSSVGDYAQIVKENSKQLETKTPGQIQLERYQKYGQLRGDFTVEEDGKKHRLINVFPTSAYRAEALRILQTQQEFNSQITDEFINRYLEILTGKRKYYHGPGNEKSRTDYGRYRTSGETLDNIFGILIGKCTFYPEEFRAAKASYTAQEFNLLNDLNNLTVPTETKKLSEEQKNQIINYVKNEKAMGPAKLFKYIAKLLSCDIADIKGYRIDKSDKAEIHTFEAYRKMKTLETIDIEKMSREELDKLAYVLTLNTEREGIQEALEHEFVDGNFSQEQIDELVQFRKANSSIFGKGWHNFSVKLMMELIPELYATSEEQMTILTRLGKQKTTSSSNKTKYIDEKLLTEEIYNPVVAKSVRQAIKIVNAAIKEYGDFDNIVIEMARATNEDDEKKAIQKIQKANKDEKDAAMLKAANQYNGKAELPHSVFHGHKQLATKIRLWHQQGERCLYTGKTISIHDLINNPNQFEIDHILPLSITFDDSLANKVLVYATANQEKGQRTPYQALDSMDDAWSFRELKAFVRESKTLSNKKKEYLLTEEDISKFDVRKKFIERNLVDTRYASRVVLNALQEHFRAHKIDTKVSVVRGQFTSQLRRHWGIEKTRDTYHHHAVDALIIAASSQLNLWKKQKNTLVNYSENQLLDIETGELISDDEYKESVFKAPYQHFVDTLKSKEFEDSILFSYQVDSKFNRKISDATIYATRKAKLDKEKKEYTYTLGKIKDIYALGTKTPSKTGFYKFLDLYKKNKSQFLMYQKDRKTWDEVIEKILEQYRPFKEKDKNGKEVDFNPFEKYRIENGPIRKYSRKGNGPEIKSLKYYDNLLGRFVDITPSESKNPVALLSLNPWRTDVYYNTETRKYEFLGLKYADLCFEKGGSYGISKVKYNKIREKEGIGKNSEFKFTLYKNDLILIKDTETNRQQVFRFWSRTGKDNPKRFEKHKIELKPYEKARFEKGEELEVLGKVPPSSNQLQKNMQIENLSIFKVRTDVLGNQHIIKNEGDKPKLDF

SEQ ID NO: 789 - protein, 97 aa, Streptococcus vestibularis
MSDLVLGLDIGIGSVGVGILNKVTGEIIHKNSRIFPAAQAENNVERRTNRQGRRLTRRKKHRRVRLNHLFEESGLITDFTKVSINLNPYQLRVKIDR

SEQ ID NO: 790 - protein, 1084 aa, Subdoligranulum sp.
MKNTLYGIGLDIGVASVGWAVVGLNGTGEPVGLHRLGVRIFDKAEQPKTGESLAAPRRMARGMRRRLRRKALRRADVYALLERSGLSTREELAQMFEAGGLEDIYALRTRALDEPVGKAEFSRILLHLAQRRGFKSNRRTASDGEDGRLLAAVNENRRRMAQGGWRTVGEMLYRHEAFALHKRNKADDYLSTVGRDMVAEEASILFERQRAMGCSWAAPELQAEYLSILLRQRSFDEGPGGNSPYGGNQVEKMVGRCTFEPDEPRAAKAAYSFEYFSLLQKLNHIRLAENGETRPLTQPQRQQLLSLAHKTPDISLARIRKELALPETVQFNGVRCRANETLEESEKKEKFACLPAYHKMRKALDGVVKGRISSLSISQRDAAATALSLYKNEDTLRAKLTEAGFQAPEIDALAGLTGFSKFGHLSLKACRKLIPHLEQGLTYDQACTAAGYDFKGHGAGERAFTLPAAAPEMEQITSPVVRRAVAQTIKVVNGIIREMDASPAWVRIELARELSKTFGERQEMDRSMRENAAQNERLMQELRDTFHLLSPTGQDLVKYRLWKEQDGVCAYSLRRLDVERLFEPGYVDVDHIVPYSLSFDDRRSNKVLVLSSENRQKGNRLPLQYLQGKRREDFIVWTNSSVHDYRKRQNLLREKLSGDEAEGFRQRNLQDTQHMARFLYNYISDHLAFAQSEALGKKRVFAVSGAVTSHLRKRWGLSKVRADGDLHHALDAAVVACTTDGMIRRISGYYGHIEGEYLQDADGAGSQHARTKERFPAPWPRFRDELIVRLSEQPAEPLLDINPEFYCEYGTEHIRPVFVSRMPRRKVTGPGHKETIKGAAAADEGLLTVRKALTELKLDKDGEIKDYYMPSSDTLLYEALKAQLRRFGGDGKKAFAEPFYKPKADGTPGPLVRKVKTTEKATLTVPVHGGAASNDTMVRVDVFLVPGDGYYWVPVYTADTLKPELPNRAVVQGKPYSEWKEMREEDFIFSLYPNDLVYVEHKSGLKFTLQNADSTLEKTRTQTSAFAYFVSGSISTASITIRTHDNAYGIPSLGVKTLKTFHKYQVDVLGNVFPVHKETRQKFR

SEQ ID NO: 791 - protein, 951 aa, Sutterella parvirubra
MPTVRPVFHSSASFDLGAKNTGLFLVNHPAGAAPSAEYAAAYTIVQPADGDGLNYSTTNRRAVRHRLRGGKRFKLARRLVLQVIDALRKLKPGLIRDEEMRRTVEALSSLLKRRGFTRIESEAQVDPTTLDSVDPAVFADHETLGGFFSLGIPISTQWDALSQNPGAVEQLFKALPSAKDFGKYVTEQFPEFAEQKKLYADAIKVLSSEAKSIVMQLGLGHHHRSKYFEMIAHDMLRDPRLQGVFELFGSEERFKTFICNVSNLQLRALRWYFDEPNPEVANQWNPEKFQVVWLRGLKYFHPDAERKADMKKLIDELTASKDILDALCTTDPRRTIPPYEDQNNRRPPFDQTLWLSAAELTRRYGDKWRIWSQKFERADRALSTGLDEILLYTDRRSRMFNRNQDPSVYADSYVLQRVLDRSSKLDRYALRALAAGYRTQELHEPLATLSDTLGTQHVETFLTFAAEYYEEVAAAKNGLWLDGPSRLLERADIHPPMKKKVLDLLLGNILDATPEIGRILRTVLWNRHVHEKSRSTPASLCRSIEAIRKDFGGEFRMRYDALDAKIRAAEDQKKKFKPTNAEEKDLFKAWNATKTMHAFLRDVLQLTPKQLERTASPYVFAQLHTLIDTERDGFTSTSLAAHLENHWRMRANAAGMAQCSRLPADAVRPFDGVLSKALDRQAFEAAKLAAQHLMSRKELTDTDIRYSIIIESNRFAFSASTAELKKNTLAKKNAEKGLNFELKRWQDKDSRIREASRGICAYTGAKLGDVVEYDHIIPRAFTTSAMGSVFNSEANLICVSRPGNQTKADKRYGLNKLHKTYLTAVFGTADVTTIAASIEDIVGKLASANRLRHFELLNEKEQDAVRHALFLDDESDARRIVLRELAAQNKSRVNGTQAWFVRAFMTKLLEITKDWRERTGNTLDIRSWKTDAEVASRLRSALNFHAEITLT

SEQ ID NO: 792 - protein, 406 aa, Sutterella parvirubra
SNLFREEVPYGDHFLPIIQMKNRIYIGYQLPKADGTGGNAVAVLGKDPLELLETLKPFLDREPQAFSDHPVTYKMINERAYELLTKCALTPDQTTELERTQAEVLRSLNYQTSRAAVLGRLVDDKNKFVAKDAVWKEKDFVISFKLSPKKSAFKASGQLELPAKSDWKALVDSPELAINWGQPADDTFSQRIERKVRMNSSHLEHTPKKRVVSLPVVDKPSGGFRIRRHNLDGSAVFQVHTVANNKYGGFSADSAGKVDWSTPVLCGHLQHANLVPLDPETASAEQLVRMSEWRVVETTSDIRLEVCPGTSGRRYVRVELPFTLLQEWLTAGKVADVPVSPLHLPGSIKLTDPKTFCAEAQKTLSIFAQPRATIFFEQLGDRVRFRFEASGGPATMNAAYNAAGRS

SEQ ID NO: 793 - protein, 389 aa, Sutterella wadsworthensis
MKACDLEEKTNHLQACVAIDLGARYTGTFSILHKSSHLPSKDDCRAATYVLPEDGGKMTYSQRNRTAVRHRIRGKKRFALARRMAMLIIREKLAAKSVTLTSSETRRLAEAVGSLLRRRGYNRLETETDNDLTVLENIEPEVFSEHEILGKYFYAGTDLAIQWETLSQDLSKISSLLAERLSEKDFKKYLTGLIPDDKNKIKHIISVFKMLIDEAESINMQCVLGHKHRTQYLSDIHADMHRDTRLSKAAEAFGGVDRLWRLLGNLSNLQLRAHRWYFNAPHLFDDQALEPARLQKTLVRAFKYLHCPQGVESRAQAELVKELEEADDIIDALCTIDPVRTIPPYENQQNRRPPFDQTLYLSPDLGVSGFLCLGRLFQGQPNEAALCFL

SEQ ID NO: 794 - protein, 976 aa, Tannerella sp.
MKKILGLDLGSNSIGWALVNEAENRDEASSIIKLGVRVNPLTVDEMQNFEKGKSITTNADRTLKRSMRRNLQRYKLRRDALIKLLKKVGFITDGTILSEQGNRTTFETYRLRAKAPDEEISLQELARVLLMINKKRGYKSSRKIKEKEAGTLIDGMEVAKKLYDEDLTPGQLCLQLLESGKKSLPDFYSSDLQEEFDRIWNFQKQFNPKAFCDTAKEEIKGKNKSQTWAILAKYFIWMEEMDVWNEKESKTERVEKECKLVGLKRTVKKEEQRKENYCWRVQALTEQLDLEKVAVVLQEINGQISTSSGYLGAISDRSKVLYFNRQTVGQYQMAELEKNPNTSLRNMVFYRQDYLDEFDKIWEKQAEFHKELTVELKKEIRDIIIFYQRRLKSQKGLIGFCEFENREIMVEKNGKMQAKVVGCKVIPRSHPLFQEFKIWQTLNNVEVFAGEKKCKRKRTDAFPGLFDGTEDTLMVEGWRYLYQEEKEILAKELSVKKSLKKEYILKLLFDNPQDLDMNFEQIEGNDTGNVLFSAYSKMIEKYGYEPLDFGKPTDKIIEQLQVIFADLGWNTDLLFVDLNKEGKDLEKQPYFKLWHLLYSFEGDNTPTGNGKLVEKLMELCHVGKECALELVNISFQNDYGSLSAKAIKKILPYLKEGNRYDVACGYAGYRHSKSSLTKEEIENKVLKDKLDILPKNSLRNPVVEKILNQMVNVINAIIDTYGKPDEIRVELARELKKSAKEREELTKAIAKSTREHEEIRKVLQEEFGMINVSRNDIIRYKLYKELKDNGYKTLYSNQDIPKEKVFSKEIDIEHIIPQARLFDDSLSNKTLEYKAINIEKGNKTAYDFVKEKYGEKGLQQYLNRCESLFKGHRTKLRKLKMGQENIPEGFIDRDLRNTQYIAKKALAMLNEICRRVVATTGSITDRLREDWQLVDVLKELRCFRYFKDTKMKANHNKNIFYTSIKVDVSDTSKILK

SEQ ID NO: 795 - protein, 1049 aa, Tistrella mobilis
MINERLTFGIDLGIGSCGWAVLRHADAAGEPGVIEGLGSWCFDVPETSKERIPTNQVRRSNRLLRRVIRRRRNRMAEIRRLFHAQGLLPSADEDALKRPRLDPWELRARGLDQCLSAEEFAVALGHIARHRGFRSSAKRKAANTSGEDSKMLSALLVTRERTARYRTVGEMFARDPEYSARRRNRDGIFDRTVARDDLIHEVGKLFEAQRARGSAFASPDLEADFNAIAFRQAEMQDSERLVGNCPFERDEKRAARWAPSFERFRLLTRLINLRIATAEGERRFTPEDLARVSAELGATAKLPVSRVRALIGLLPDERFTTIRVEDEDRDIVARTGEAAPGTWRLRKTLGEALWAEMQARPDQLDAIAHVLSFFEATAKIRSELDRLGLPAAVIEALDRGLEDGAFAKFKGAGHISAKACRNLLPHLQQGHRYDQACRLAGYDHAASTLSHTAQVVSKAGFNALVTELGESIANPIARKALTEGLKQIRAMCARWGLPGAIHIELAREVGNSIEKRRELESQRETTTKRRQTERDEIRGLLALEDVDDDTLLRYRLWKEQGGKCLYTGKDIHVRQLIATDNSVQVDHILPWSRFGDDSFNNKTLCLASANQRKRGQTPWEWFSLTGTPEAWEVFASRVETSKDLRGFKKRNLLLKNADEVAQRFRSRNLNDTRYAARLLAEAAKLFYPAGDRQEKDGRRRVLTRPGPLTAALRHAWGLESLKKADGKRVSDDRHHALDALAVAAISEREVQRLTRSFQEWEQQGLARPLRHVAPPWPGFRGDVLAAYAQAFVARPERRRARGKGHDASIRQVVGEGPEAQVFERRGLADLKEADLDRVKDPERNQAIIEAVRAWILAGRPADAPPRSPRGDVIVKLRTAPAKKIKPAVPVRGGTADRGDMVRIDVFTRPNRKGRDEWYLVPIYPHQVMNRKAWPHPPMRSVVAYKDEAGWTEIGAEHSFRFSLYPRSYVQLVKSNGDVIEGYLVSMDRSTGAFRVFVHNNPAEMAKGIGAKTLLNLRKFNVDRFGVRTEVKSEVRTWHGEVCTSPVPPD

SEQ ID NO: 796 - protein, 1395 aa, Treponema denticola
MKKEIKDYFLGLDVGTGSVGWAVTDTDYKLLKANRKDLWGMRCFETAETAEVRRLHRGARRRIERRKKRIKLLQELFSQEIAKIDEGFFQRMKESPFYAEDKTILQENALFNDKDFTDKTYHKAYPTINHLIKAWIENKVKPDPRLLYLACHNIIKKRGHFLFEGDFDSENQFDTSIQALFEYLREDMEVDIDADSQKVKEILKDSSLKNSEKQSRLNKILGLKPSDKQKKAITNLISGNKINFADLYDNPDLKDAEKNSISFSKDDFDALSDDLASILGDSFELLLKAKAVYNCSVLSKVIGDEQYLSFAKVKIYEKHKTDLTKLKAVIKKHFPNNYKKVFGYNQDNESKNNYSGYVGVCKTKNKKLVINNSVNQEDFYKFLKPILSAKSEIKEVNDILAEIETGNFLPKQISKSNAEIPYQLRKMELEKILSNAEKHFSFLKQKDEKGLSHSEKIIMLLTFKIPYYIGPINDNHKKSFPDRCWVVKKEKSPSGKTTPWNFFDHIDKEKTAEEFITSRTNFCTYLIGESVLPKNSLLYSEYTVLNEINNLQIIIDGKNICDTKLKQKIYEDLFKKYKKITQKQISTFIKHEGICNKTDEVIILGIDKECTSSLKSYIELKNIFGKQVDEISTKNMLEEIIRWATIYDEGEGKTILKTKIKAEYGKYCSDEQIKKILNLKFSGWGRLSRKFLETVTSEMPGFSEPVNIITAMRETQNNLMELLSSEFKFTENIKKINSGFEDAEKQFSYDGLVKPLFLSPSVKKMLWQTLKLVKEISHITQAPPKKIFIEMAKGAELEPARTKTRLKILQDLYSSCKNDADAFSSEIQYLSGKIENEDNLRLRSDKLYLYYTQLGKCMYCGKPIEIGHVFDTSNYDIDHIYPQSKIKDDSISNRVLVCSSCNKNKEDKYPLKSEIQSKQRGFWNFLQRNNFISLEKLNRLTRTTPISDDETAKFIARQLVETRQATKVAAKVLEKMFPETKIVYSKAETVSMFRNKFDIIKCREINDFHHAHDAYLNIVVGNVYNTKFTNNPWNFIKEKRDNPKIADTYNYYKVFDYDVKRNNITAWEKGKTIITVKDMLKRNTPIYTRQAACKKGGLFDQTIMKKGLGQHPLKKEGPFSNISKYGGYNKVSAAYYTLIEYEEKGNKIRSLETIPLYLVKDIQKDQDVLKSYLTDLLGKKEFKILVPKIKINSLLKINGFPCHITGKTNDSFLLRPAVQFCCSNDEVLYFKKIIRFSEIRSQREKIGKTISPYEDLSFRSYIKENLCKKTKNDEIGEKEFYDLLQKKNLEIYDMLLTKHKDTIYKKRPNSATIDILVKGKEKFKSLIIENQFEVILEILKLFSATRNVSELQHIGGSKYSGVAKIGNKISSLDNCILIYQSITGIFEKRIDLLKV

SEQ ID NO: 797 - protein, 769 aa, Treponema denticola
MKKEIKDYFLGLDVGTGSVGWAVTDTDYKLLKANRKDLWGMRCFETAETAEVRRLHRGARRRIERRKKRIKLLQELFSQEIAKIDEGFFQRMKESPFYAEDKTILQENALFNDKDFTDKTYHKAYPTINHLIKAWIENKVKPDPRLLYLACHNIIKKRGHFLFEGDFDSENQFDTSIQALFEYLREDMEVDIDADSQKVKEILKDSSLKNSEKQSRLNKILGLKPSDKQKKAITNLISGNKINFADLYDNPDLKDAEKNSISFSKDDFDALSDDLASILGDSFELLLKAKAVYNCSVLSKVIGDEQYLSFAKVKIYEKHKTDLTKLKAVIKKHFPNNYKKVFGYNQDNESKNNYSGYVGVCKTKNKKLVINNSVNQEDFYKFLKPILSAKSEIKEVNDILAEIETGNFLPKQISKSNAEIPYQLRKMELEKILSNAEKHFSFLKQKDEKGLSHSEKIIMLLTFKIPYYIGPINDNHKKSFPDRCWVVKKEKSPSGKTTPWNFFDHIDKEKTAEEFITSRTNFCTYLIGESVLPKNSLLYSEYTVLNEINNLQIIIDGKNICDTKLKQKIYEDLFKKYKKITQKQISTFIKHEGICNKTDEVIILGIDKECTSSLKSYIELKNIFGKQVDEISTKNMLEEIIRWATIYDEGEGKTILKTKIKAEYGKYCSDEQIKKILNLKFSGWGRLSRKFLETVTSEMPGFSEPVNIITAMRETQNNLMELLSSEFKFTENIKKINSGFEDAEKQFSYDGLVKPLFLSPSVKKCCGRL

SEQ ID NO: 798 - protein, 1395 aa, Treponema denticola
MKKEIKDYFLGLDVGTGSVGWAVTDTDYKLLKANRKDLWGMRCFETAETAEVRRLHRGARRRIERRKKRIKLLQELFSQEIAKIDEGFFQRMKESPFYAEDKTILQENALFNDKDFTDKTYHKAYPTINHLIKAWIENKVKPDPRLLYLACHNIIKKRGHFLFEGDFDSENQFDTSIQALFEYLREDMEVDIDADSQKVKEILKDSSLKNSEKQSRLNKILGLKPSDKQKKAITNLISGNKINFADLYDNPDLKDAEKNSISFSKDDFDALSDDLASILGDSFELLLKAKAVYNCSVLSKVIGDEQYLSFAKVKIYEKHKTDLTKLKAVIKKHFPNNYKKVFGYNQDNESKNNYSGYVGVCKTKNKKLVINNSVNQEDFYKFLKPILSAKSEIKEVNDILAEIETGNFLPKQISKSNAEIPYQLRKMELEKILSNAEKHFSFLKQKDEKGLSHSEKIIMLLTFKIPYYIGPINDNHKKSFPDRCWVVKKEKSPSGKTTPWNFFDHIDKEKTAEEFITSRTNFCTYLIGESVLPKNSLLYSEYTVLNEINNLQIIIDGKNICDTKLKQKIYEDLFKKYKKITQKQISTFIKHEGICNKTDEVIILGIDKECTSSLKSYIELKNIFGKQVDEISTKNMLEEIIRWATIYDEGEGKTILKTKIKAEYGKYCSDEQIKKILNLKFSGWGRLSRKFLETVTSEMPGFSEPVNIITAMRETQNNLMELLSSEFKFTENIKKINSGFEDAEKQFSYDGLVKPLFLSPSVKKMLWQTLKLVKEISHITQAPPKKIFIEMAKGAELEPARTKTRLKILQDLYSSCKNDADAFSSEIQYLSGKIENEDNLRLRSDKLYLYYTQLGKCMYCGKPIEIGHVFDTSNYDIDHIYPQSKIKDDSISNRVLVCSSCNKNKEDKYPLKSEIQSKQRGFWNFLQRNNFISLEKLNRLTRTTPISDDETAKFIARQLVETRQATKVAAKVLEKMFPETKIVYSKAETVSMFRNKFDIIKCREINDFHHAHDAYLNIVVGNVYNTKFTNNPWNFIKEKRDNPKIADTYNYYKVFDYDVKRNNITAWEKGKTIITVKDMLKRNTPIYTRQAACKKGELFNQTIMKKGLGQHPLKKEGPFSNISKYGGYNKVSAAYYTLIEYEEKVNKIRSLETIPLYLVKDIQKDQDVLKSYLTDLLGKKEIKILVPKIKINSLLKINGFPCHITGKTGDSFVLRPAVQFCCSNDEVLYFKKIIRFNEIRSQREKMGKTISPYEDLSFRSYIKENLCKKTKADEIGEKEFYDLLQKKNLEIYDMLLTKHKDTIYNKRPNSTTLGMLTKGRYEFINLKPKDQIIVMLEILKLFCTTREAIDLGLIKGKPAAGVATLGKKISNLDNCILIYQSITGIFEKRIDLLKV

SEQ ID NO: 799 - protein, 1395 aa, Treponema denticola
MKKEIKDYFLGLDVGTGSVGWAVTDTDYKLLKANRKDLWGMRCFETAETAEVRRLHRGARRRIERRKKRIKLLQELFSQEIAKIDEGFFQRMKESPFYAEDKTILQENTLFNDKDFTDKTYHKAYPTINHLIKAWIENKVKPDPRLLYLACHNIIKKRGHFLFEGDFDSENQFDTSIQALFEYLREDMEVDIDADSQKVKEILKDSSLKNSEKQSRLNKILGLKPSDKQKKAITNLISGNKINFADLYDNPDLKDAEKNSISFSKDDFDALSDDLASILGDSFELLLKAKAVYNCSVLSKVIGDEQYLSFAKVKIYEKHKTDLTKLKNVIKKHFPKDYKKVFGYNKNEKNNNNYSGYVGVCKTKSKKLIINNSVNQEDFYKFLKTILSAKSEIKEVNDILTEIETGTFLPKQISKSNAEIPYQLRKMELEKILSNAEKHFSFLKQKDEKGLSHSEKIIMLLTFKIPYYIGPINDNHKKSFPDRCWVIKKEKSPSGKTTPWNFFDHIDKDKTAEAFITSRTNFCTYLVGESVLPKSSLLYSEYTVLNEINNLQIIIDGKNICDIKLKQKIYEELFKKYKKITQKQISTFIKHEGICNKTDEVIILGIDKECTSSLKSYIELKNIFGKQVDEISTKNMLEEIIRWATIYDEGEGKTILKTKIKAEYGKYCSDEQIKKILNLKFSGWGRLSRKFLETVTSEMPGFSEPVNIITAMRETQNNLMELLSSEFKFTENIKKINSGFEDAEKQFSYNGLVKPLFLSPSVKKMLWQTLKLVKEISHITQAPPKKIFIEMAKGAELEPARTKTRLKILQDLYNNCKNDADAFSSEIKDLSGKIENEDNLRLRSDKLYLYYTQLGKCMYCGKPIEIGHVFDTSNYDIDHIYPQSKIKDDSISNRVLVCSSCNKNKEDKYPLKSEIQSKQRGFWNFLQRNNFISLEKLNRLTRTTPISDDETAKFIARQLVETRQATKVAAKVLEKMFPETKIVYSKAETVSMFRNKFDIIKCREINDFHHAHDAYLNIVVGNVYNTKFTNNPWNFIKEKRDNPKIADTYNYYKVFDYDVKRNNITAWEKGKTIITVKDMLKRNTPIYTRQAACKKGGLFDQTIMKKGLGQHPLKKEGAFSNISKYGGYNKVSAAYYTLIEYEEKGNKIRSLETIPLYLVKDIQKDQDVLKSYLTDLLGKKEIKILVPKIKINSLLKINGFPCHITGKTGDSFVLRPAVQFCCSNDEVLYFKKIIRFNEIRSQREKMGKTISPYEDLSFRSYIKENLCKKTKADEIGEKEFYDLLQKKNLEIYDMLLTKHKDTIYNKRPNSTTLGMLTKGRYEFINLKPKDQIIVMLEILKLFCTTREAIDLGLIKGKPAAGVATLGKKISNPDNCILIYQSITGIFEKRIDLLKV

SEQ ID NO: 800 - protein, 1395 aa, Treponema denticola
MKKEIKDYFLGLDVGTGSVGWAVTDTDYKLLKANRKDLWGMRCFETAETAEVRRLHRGARRRIERRKKRIKLLQELFSQEIAKIDEGFFQRMKESPLYAEDKTILQENTLFNDKDFTDKTYHKAYPTINHLIKAWIENKVKPDPRLLYLACHNIIKKRGHFLFEGDFDSENQFDTSIQALFEYLREDMELDIDADSQKVKEILKDSSLKNSEKQSRLNKMLGLKPSDKQKKAITNLISGNKINFADLYDNPDLKDAEKNSISFSKDDFDALSDDLASILGDSFELLLKAKAVYNCSVLSKVIGDEQYLSFAKVKIYEKHKTDLTKLKNVIKKHFPKDYKKVFGYNKNEKNNNNYSAYVGVCKITHKKLVIKNSASQEDFYKFLKTILSAKSEIKEVNDILTEIETGTFLPKQISKSNAEIPYQLRKMELEKILSNAEKHFSFLKQKDEKGLSHSEKIIMLLTFKIPYYIGPINDNHKKSFPDRCWVVKKEKSPSGKTTPWNFFDHIDKEKTAEEFITSRTNFCTYLIGESVLPKSSLLYSEYTVLNEINNLQIIIDGKNICDIKLKQKIYEELFKKYKKITQKQISTFIKHEGICNKTDEVIILGIDKECTSSLKSYIELKNIFGKQVDEISTKNMLEEIIRWATIYDEGEGKTILKTKIKAEYGKYCSDEQIKKILNLKFSGWGRLSRKFLETVTSEMPGFSEPVNIITAMRETQNNLMELLSSEFKFTENIKKINSGFEDAEKQFSYNGLVKPLFLSPSVKKMLWQTLKLVKEISHITQAPPKKIFIEMAKGAELEPARTKTRLKILQDLYSSCKNDADAFSSEIQYLSGKIENEDNLRLRSDKLYLYYTQLGKCMYCGKPIEIGHVFDTSNYDIDHIYPQSKIKDDSISNRVLVCSSCNKNKEDKYPLKAEIQSKQRGFWNFLQRNNFISLEKLNRLTRTSPISDDETAKFIARQLVETRQATKVAAKVLEKMFPETKIVYSKAETVSMFRNKFDIIKCREINDFHHAHDAYLNIVVGNVYNTKFTNNPWNFIKEKRDNPKIADTYNYYKVFDYDVKRNNITAWEKGKTIITVKDMLKRNTPIYTRQAACKKGELFNQTIMKKGLGQHPLKKEGPLSNISKYGGYNKVSAAYYTLIEYEEKGSKIRSLETIPLYLVKDIQKNKDGLKSYLTDQIGKKEIKILIPKIKINSLLKINGFPCHITGKMGEAFVLRPAVQFCCSNDEALYFKKIIRFNEIRKQREKMGKTISPYEDLSFRSYIKDNLCKKTKADEIEEKEFYDLLQKKNLEIYDMLLTKHKDTIYKKRPNSATIDILVKGKEKFKSLIIENQFEVILEILKLFSATRNVSDLQHIGGSKNAGNARVGNKISSLDNCILIYQSITGIFEKRIDLLKI

SEQ ID NO: 801 - protein, 1395 aa, Treponema denticola
MKKEIKDYFLGLDVGTGSVGWAVTDTDYKLLKANRKDLWGMRCFETAETAEVRRLHRGARRRIERRKKRIKLLQELFSQEIAKIDEGFFQRMKESPLYAEDKTILQENTLFNDKDFTDKTYHKAYPTINHLIKAWIENKVKPDPRLLYLACHNIIKKRGHFLFEGDFDSENQFDTSIQALFEYLREDMEVDIDADSQKVKEILKDSSLKNSEKQSRLNKMLGLKPSDKQKKAITNLISGNKINFADLYDNPDLKDAEKNSISFSKDDFDALSDDLASILGDSFELLLKAKAVYNCSVLSKVIGDEQYLSFAKVKIYEKHKTDLTKLKNVIKKHFPKDYKKVFGYNKNEKNNNNYSGYVGVCKTKSKKLIINNSVNQEDFYKFLKTILSAKSEIKEVNDILTEIETGTFLPKQISKSNAEIPYQLRKMELEKILSNAEKHFSFLKQKDEKGLSHSEKIIMLLTFKIPYYIGPINDNHKKSFPDRCWVVKKEKSPSGKTTPWNFFDHIDKEKTAEEFITSRTNFCTYLIGESVLPKNSLLYSEYTVLNEINNLQIIIDGKNICDTKLKQKIYEELFKKYKKITQKQISTFIKHEGICNKTDEVIILGIDKECTSSLKSYIELKNIFGKQVDEISTKNMLEEIIRWATIYDEGEGKTILKTKIKAEYGKYCSDEQIKKILNLKFSGWGRLSRKFLETVTSEMPGFSEPVNIITAMRETQNNLMELLSSEFKFTENIKKINSGFEDVEKQFSYDGLVKPLFLSPSVKKMLWQTLKLVKEISHITQAPPKKIFIEMAKGAELDPVRTKTRLKILQDLYNNCKNDADAFSSEIKDLSGKIENEDNLRLRSDKLYLYYTQLGKCMYCGKPIEIGHVFDTSNYDIDHIYPQSKIKDDSISNRVLVCSSCNKNKEDKYPLKAEIQSKQRGFWNFLQRNNFISLEKFNRLTRATPISDDETAKFIARQLVETRQATKVAARVLEKMFPETKIVYSKAETVSMFRNKFDIVKCREINDFHHAHDAYLNIVVGNVYNTKFTNNLWNFIKEKRDNPKIADTYNYYKVFDYDVKRNNITAWEKGKTIITVKDMLKRNTPIYTRQAACKKGGLFDQTIMKKGLGQHPLKKEGPFSNISKYGGYNKVSAAYYTLIEYEEKGNKIRSLETIPLYLVKDIQKDQDVLKSYLTDLLGKKEFKILVPKIKINSLLKINGFPCHITGKTNDSFLLRPAVQFCCSNDEVLYFKKIIRFSEIRSQREKIGKTISPYEDLSFRSYIKENLCKKTKNDEIGEKEFYDLLQKKNLEIYDMLLTKHKDTIYKKRPNSATIDILVKGKEKFKSLIIENQFEVILEILKLFSATRNVSDLQHIGGSKYSGVAKIGNKISSLDNCILIYQSITGIFEKRIDLLKV

SEQ ID NO: 802 - protein, 357 aa, Treponema denticola
MKKEIKDYFLGLDVGTGSVGWAVTDTDYKLLKANRKDLWGMRCFETAETAEVRRLHRGARRRIERRKKRIKLLQELFSQEIAKTDEGFFQRMKESPFYAEDKTILQENALFNDRDFTDKTYHKAYPTINHLIKAWIENKVKPDPRLLYLACHNIIKKRGHFLFEGDFDSENQFDTSIQAFFEYLREDMEVDIDADSQKIKEILKDSSLKNSEKQSRLNKILGLKSSDKQKKAITNLISGNKINFADLYDNPDLKDAEKNSISFSKDDFDALSDDLASILGDSFELLLKAKAVYNCSVLSKVIGDEQYLSFAKVKIYEKHKTDLTKLKNVIKKHFPKDYKKVFGYNKNEKITTITPDM

SEQ ID NO: 803 - protein, 1395 aa, Treponema denticola
MKKEIKDYFLGLDVGTGSVGWAVTDTDYKLLKANRKDLWGMRCFETAETAEVRRLHRGARRRIERRKKRIKLLQELFSQEIAKTDEGFFQRMKESPFYAEDKTILQENALFNDRDFTDKTYHKAYPTINHLIKAWIENKVKPDPRLLYLACHNIIKKRGHFLFEGDFDSENQFDTSIQALFEYLREDMEVDIDADSQKVKEILKDSSLKNSEKQSRLNKMLGLKPSDKQKKAITNLISGNKINFADLYDNPDLKDAEKNSISFSKDDFDALSDDLASILGDSFELLLKAKAVYNCSVLSKVIGDEQYLSFAKVKIYEKHKTDLTKLKNVIKKHFPNDYKKVFGYNKNEKNNNNYSAYVGVCKTKSKKLVINNTVNQEDFYKFLKPILLAKSEIKEVNDILTEIETGTFLPKQISKSNAEIPYQLRKMELEKILSNAEKHFSFLKQKDEKGLSHSEKIIMLLTFKIPYYIGPINDNHKKSFPDRCWVIKKEKSPSGKTTPWNFFDHIDKDKTAEAFITSRTNFCTYLVGESVLPKNSLLYSEYTVLNEINNLQIIIDGKNICDIKLKQKIYEELFKKYKKITQKQISTFIKHEGICNKTDEVIILGIDKECTSSLKSYIELKNIFGKQVDEISTKNMLEEIIRWATIYDEGEGKTILKTKIKAEYGKYCSDEQIKKILNLKFSGWGRLSRKFLETVTSEMPGFSEPVNIITAMRETQNNLMELLSSEFKFTENIKKINSGFEDVEKQFSYDSLVKPLFLSPSVKKMLWQTLKLVKEISHITQAPPKKIFIEMAKGAELDPVRTKTRLKILQDLYNNCKNDADAFSSEIKDLSGKIENEDNLRLRSDKLYLYYTQLGKCMYCGKPIEIGHVFDTSNYDIDHIYPQSKIKDDSISNRVLVCSSCNKNKEDKYPLKAEIQSKQRGFWNFLQRNNFISLEKLNRLTRTSPISDDETAKFIARQLVETRQATKVAAKVLEKMFPETKIVYSKAETVSMFRNKFDIIKCREINDFHHAHDAYLNIVVGNVYNTKFTNNPWNFIKEKRDNPKIADTYNYYKVFDYDVKRNNITAWEKGKTIITVKDMLKRNTPIYTRQAACKKGELFNQTIMKKGLGQHPLKKEGPLSNISKYGGYNKVSAAYYTLIEYEEKGSKIRSLETIPLYLVKDIQKNKDGLKSYLTDQIGKKEIKILIPKIKINSLLKINGFPCHITGKMGEAFVLRPAVQFCCSNDEALYFKKIIRFNEIRKQREKMGKTISPYEDLSFRSYIKDNLCKKTKADEIEEKEFYDLLQKKNLEIYDMLLTKHKDTIYKKRPNSATIDILVKGKEKFKSLIIENQFEVILEILKLFSATRNVSDLQHIGGSKNAGNARVGNKISSLDNCILIYQSITGIFEKRIDLLKI

SEQ ID NO: 804 - protein, 631 aa, Treponema denticola
MLWQTLKLVKEISHITQAPPKKIFIEMAKGAELEPARTKTRLKILQDLYNNCKNDADAFSSEIKDLSGKIENEDNLRLRSDKLYLYYTQLGKCMYCGKPIEIGHVFDTSNYDIDHIYPQSKIKDDSISNRVLVCSSCNKNKEDKYPLRSEIQSKQRGFWNFLQRNNFISLEKLNRLTRTTPISDDETAKFIARQLVETRQATKVAAKVLEKMFPETKIVYSKAETVSMFRNKFDIVKCREINDFHHAHDAYLNIVVGNIYNTKFTNNPWNFIKEKRDNPKIADTYNYYKVFDYDVKRNNITAWEKGKTIITVKDMLKRNTPIYTRQAACKKGGLFDQTIMKKGLGQHPLKKEGPFSNISKYGGYNKVSAAYYTLIEYEEKENKIRSLETIPLYLVKDIQKSQEKLKSYLTDLLGKKEIKILVPKIKINSLLKINGFPCHITGKTNDSFLLRPAVQFCCSNDEVLYFKKIIRFNEIRSQREKMGKTISPYEDLSFRSYIKENLCKKTKNDEIGEKEFYDLLQKKNLEIYDMLLTKHKDTIYNKRPNSTTLGMLTKGRYEFINLKPKDQIIVMLEILKLFCTTREAIDLGLIKGKPAAGVATLGKKISNLDNCILIYQSITGIFEKRIDLLKV

SEQ ID NO: 805 - protein, 631 aa, Treponema denticola
MLWQTLKLVKEISHITQAPPKKIFIEMAKGAELEPARTKTRLKILQDLYSSCKNDADAFSSEIQYLSGKIENEDNLRLRSDKLYLYYTQLGKCMYCGKPIEIGHVFDTSNYDIDHIYPQSKIKDDSISNRVLVCSSCNKNKEDKYPLKSEIQSKQRGFWNFLQRNNFISLEKLNRLTRTTPISDDETAKFIARQLVETRQATKVAAKVLEKMFPETKIVYSKAETVSMFRNKFDIIKCREINDFHHAHDAYLNIVVGNVYNTKFTNNPWNFIKEKRDNPKIADTYNYYKVFDYDVKRNNITAWEKGKTIITVKDMLKRNTPIYTRQAACKKGELFNQTIMKKGLGQHPLKKEGPFSNISKYGGYNKVSAAYYTLIEYEEKVNKIRSLETIPLYLVKDIQKDQDVLKSYLTDLLGKKEIKILVPKIKINSLLKINGFPCHITGKTGDSFVLRPAVQFCCSNDEVLYFKKIIRFNEIRSQREKMGKTISPYEDLSFRSYIKENLCKKTKADEIGEKEFYDLLQKKNLEIYDMLLTKHKDTIYNKRPNSTTLGMLTKGRYEFINLKPKDQIIVMLEILKLFCTTREAIDLGLIKGKPAAGVATLGKKISNLDNCILIYQSITGIFEKRIDLLKV

SEQ ID NO: 806 - protein, 370 aa, Treponema denticola
MTEIETGTFLPKQISKSNAEIPYQLRKMELEKILSNAEKHFSFLKQKDEKGLSHSEKIIMLLTFKIPYYIGPINDNHKKSFPDRCWVVKKEKSPSGKTTPWNFFDHIDKEKTAEEFITSRTNFCTYLVGESVLPKSSLLYSEYTVLNEINNLQIIIDGKNICDIKLKQKIYEELFKKYKKITQKQISTFIKHEGICNKTDEVIILGIDKECTSSLKSYIELKNIFGKQVDEISTKNMLEDIIRWAAIYDEGEGKTILKTKIKAEYGKYCSDEQIKKILNLKFSGWGRLSRKFLETVTSEMPGFSEPVNIITAMRETQNNLMELLSSEFKFTENIKKINSGFEDVEKQFSYDGLVKPLFLSPSVKKCCGRL

SEQ ID NO: 807 - protein, 591 aa, Treponema phagedenis
MARGKEAEKGRTSSRYASIKALYENCKQDLADYDAVLEQFKSEEPLRLRSDKLYLYYTQLGRCMYTGRVIDIDRLMSDNSAYDIDHIYPRSKIKDDSLTNRVLVVKDANQDKRDEPLSPQIQDKQKGFWDFLKHNNFISIEKYERLTYRGYFTEEMLSGFIARQLVETRQGTKTAGQILEQLYPDSTVVYCKAANTSEFRQKFNLIKCREINDLHHAHDAYLNIAVGNVYYTKFTSNPRNFMKLKEPYNLRELFDRDVERNNTIAWVKNKTITTIKDMLKRNTPLYTRYAYCKTGGFFDQNIMKKGKGQFPLKENSPLSDISKYGGYNKVSGAYFILVQKKEKDAVVRILETVPLYLLNKPGKESENVREYLSTALGTKDFKILIPKIKINSLFKINGFLVHITGKTNDRFLVRSAVQFFCDDNLTLFFKRIIAFNGLRNLNKDKSMTAYDDNTMRVYVRGNLFKDKNQLFDKNKFNEIVKGKNISVYKDMVKRYETSIYKFRPNTAVIPILKSGEDKFINLPIEEQFKILQEILKLFGAINGTANLTLIGGRPSTGEMKISNNISNLKQCILIHQSPTGVFEQQIDLLKI

SEQ ID NO: 808 - protein, 1062 aa, Treponema sp.
MIMKLEKWRLGLDLGTNSIGWSVFSLDKDNSVQDLIDMGVRIFSDGRDPKTKEPLAVARRTARSQRKLIYRRKLRRKQVFKFLQEQGLFPKTKEECMTLKSLNPYELRIKALDEKLEPYELGRALFNLAVRRGFKSNRKDGSREEVSEKKSPDEIKTQADMQTHLEKAIKENGCRTITEFLYKNQGENGGIRFAPGRMTYYPTRKMYEEEFNLIRSKQEKYYPQVDWDDIYKAIFYQRPLKPQQRGYCIYENDKERTFKAMPCSQKLRILQDIGNLAYYEGGSKKRVELNDNQDKVLYELLNSKDKVTFDQMRKALCLADSNSFNLEENRDFLIGNPTAVKMRSKNRFGKLWDEIPLEEQDLIIETIITADEDDAVYEVIKKYDLTQEQRDFIVKNTILQSGTSMLCKEVSEKLVKRLEEIADLKYHEAVESLGYKFADQTVEKYDLLPYYGKVLPGSTMEIDLSAPETNPEKHYGKISNPTVHVALNQTRVVVNALIKEYGKPSQIAIELSRDLKNNVEKKAEIARKQNQRAKENIAINDTISALYHTAFPGKSFYPNRNDRMKYRLWSELGLGNKCIYCGKGISGAELFTKEIEIEHILPFSRTLLDAESNLTVAHSSCNAFKAERSPFEAFGTNPSGYSWQEIIQRANQLKNTSKKNKFSPNAMDSFEKDSSFIARQLSDNQYIAKAALRYLKCLVENPSDVWTTNGSMTKLLRDKWEMDSILCRKFTEKEVALLGLKPEQIGNYKKNRFDHRHHAIDAVVIGLTDRSMVQKLATKNSHKGNRIEIPEFPILRSDLIEKVKNIVVSFKPDHGAEGKLSKETLLGKIKLHGKETFVCRENIVSLSEKNLDDIVDEKIKSKVKDYVAKHKGQKIEAVLSDFSKENGIKKVRCVNRVQTPIEITSGKISRYLSPEDYFAAVIWEIPGEKKTFKAQYIRRNEVEKNSKGLNVVKPAVLENGKPHPAAKQVCLLHKDDYLEFSDKGKMYFCRIAGYAATNNKLDIRPVYAVSYCADWINSTNETMLTGYWKPTPTQNWVSVNVLFDKQKARLVTVSPIGRVFRK

SEQ ID NO: 809 - protein, 281 aa, Treponema vincentii
MKTLGLDIGTNSIGWGIVDETANKIEDCGVYIFPEGVKKEKGNESSKAAERTSFRLARRLKFRRKLRKCETLKVLIKNKMCPLTMEELEKWRKQKIYPVSQDFLNWYRTDELKNWEPYFLRKKCAEQKAGPYEIGRALYHLAQRRGFLSNRKESTKASDGKVSKSIDELSSLMDGRTLGQYFYELKQSGEKVRGKYTSRKEHYEKEFNKICEVQEISPELKDDLYRAIFFQRKLKSQKFLVGKCTFERNKPRAPISHFEFEEFRMLSFINSIKIAKKLRRR

SEQ ID NO: 810 - protein, 675 aa, uncultured bacterium
MTAENYSNVRFAFDIGTNSIGWAVFQLNDKQEATSILNAGARIFSDGRDPKTFEPLAVRRRNVRSASRMRDRYLRRRKRTLDKLIGYGLLPEDKAERDKILLETNDKPSGSTDKKTDPYSLRARALEEKLPLAYVARALFHIGQRRGFKSNRKADRKSNEKGKIAAGIEELSGLMHQSHAPTLGAYLAKRREEGHVVRLRASSEALTNKAYAFYPERAMLEDEFHKIWQAQAEYYPDVLTKEREEELFHVMFFQRPLKEQKVGLCTLVEGELRLPKSDPLFQQFRLYKEINELAIILPDLSQRKLTMEERDTLITLMRPAKTKTFAALRKALKIPAGGRFNKETENRKQLTGDEVYSVFSKPELFGGDWAKFSIEQQREIIDQLNNEENPDKLEEWLKNKFPKLSDEQRSEIINANLPDGYGRFGITATSKILEQLKKDVISEAEAAHRCGFDHSLANRNWKGLDELPRYQEVLERHIVPGTGDKNDIYDIYKGRLTNPTVHIGLNQVRRLTNRLIKAYGKPWQIVVELARDLPMSSEERKEHNKTLNDNIKAGFERTQKLERLGQKDNANNRLLLKLWEELGKDPDDRKSIYSGTRITEPMLFSGEVEIDHILPFSLTYDDSYANKILCLREENRIKRNRAPADVTEWKDRYDEIIGRSKNCQRTNKNVLGPMQ

SEQ ID NO: 811 - protein, 1017 aa, uncultured bacterium]
MRVDSLGRCLSDEEWARVIYHLCKHRGFHWISRAEAKQTEGDSKSEGGKVKQGLAGTAKLMDEKGYRSAAEMVLAEFPEAQRNKQGEYRKALSRELLAKELALLFARQRVFGNRHATDTLETAILGNSDKKSGLFWQQKPALAGADLLKMLGTCTFEKNEYRAPKASFTAERHVWLTRLNNLRIVTDGITRQLTEQERQLVLPLPYRQAGDLTYKQLGMALTKAGLLEAGCFKFIGLAYPTEAQKAEGKTKDPESATLVKIPAWQELRQTLNKASLNDEWEKLSGDALCGQPEIFDKIAWILSVYKDDDEVRTELAKLVLPNPEGLTEALLNIRFDKFHALSLKALRAIVPHMEKGLRYDEACVQAGYHHSQLHKIGEGEHKYLPPLYDGRDGDGRMIFAEDADIPRNPVVLRSLNQARKVVNAIIRRYGSPSAVHIEMARDLSRPFDERNKIKKDQDEYQARNQRDREQFIELFGHPPKGLEFEKWRLYREQNGQCAYSQKPLASSGDVAEIFLDGSTEIDHALPYSRSFDDSKNNKVLVLTRENRDKGNRTPYEYLGGAENSERWQRFFSFVESNKAYRLAKRTRLLRKDFGAKESEEFRERNLNDTRYVCRFFKNYVEQHLKLAEGSEAKRCVVVSGQLTNFLRTRWGLLKIRSDSDRHHALDAAVVAACSHSMVQRLSNYSRTRELEQVRDGFVNIETGEIVNPAMHQQLREHFPDPWPYFRHELEARLKIDSPALLREEMARLSSYTEEELAALKPLFVSRAPQRRNGGAAHKDTIYGQPEKLKKNGSVSQKVALASLALKDIDLLADPHRNAKLYGAIRERLEAHGGKGDKAFPATNPLRKPDKEGNPTGPIVRTVTKVIDKLSGIPVRGGIAKNDTMLRVDVFTKAGRFHLVPVYVHHRVTGLPNQAITRGKDENQWAIIDDTFEWRFSLYPNDLVQIRLKDETHLGYYASTDRSTSSISIWAHDRNQSVGKDGLIRSIGVTTAKDIEKFHVDTLGNVYPAPPEKRRGLA

SEQ ID NO: 812 - protein, 600 aa, uncultured bacterium]
VNAIIKKHGSLSAVHIEMARDLSRPLDERREVKKLQEEFKDRNDKARESFEADHGYRPKGIVFEKWMLYREQHGKCAYSMEGLDIDRVLNDANYAQIDHALPYSRSYDDSKNNKVLVLTRENQNKGNRTAYEYLTSFAGGEDGDRWRNYAAWVNSNKSYRMAKRNRLLRKNYGPDEASGFKDRNLNDTRYICKFFKNYVEEHLQLAPRADGNANKRCVVVNGQLTAFLRARWGLSKVRSESDRHHALDAAVVAACSHGMVKALADYARNKEVAYLREGFPDPETGEIINPEAHARGVHHFPEPWAHFRHELQVRLYSDDLQALREDLQRLGTYSEQDLLGVRTLFVSRAPQRRNDGAVHKETIYAQPEALRKQGGVVQKVPLTSLSLKDLDNLADPHRNAKLYTALRARLEAHGGKADKAFGPDQPFYKPDKNGNPTGPIVRTIKLVIDKLSGIPIRGGVAKNDTMLRVDVFTKAGKFHLVPVYVHHRVTGLPDRAIVAFKDEVEWTQVDDSFKFLFSIHPNDLIRIGLKAKEPMIGYFASCHRGTGAFNVWSHDRNTSVGKSGSVEGIGIKTALSLEKLNIDVLGNVYPARPEQRHGLA

SEQ ID NO: 813 - protein, 1011 aa, uncultured delta
MSSKAIDSLEQLDLFKPQEYTLGLDLGIKSIGWAILSGERIANAGVYLFETAEELNSTGNKLISKAAERGRKRRIRRMLDRKARRGRHIRYLLEREGLPTDELEEVVVHQSNRTLWDVRAEAVERKLTKQELAAVLFHLVRHRGYFPNTKKLPPDDESDSADEEQGKINRATSRLREELKASDCKTIGQFLAQNRDRQRNREGDYSNLMARKLVFEEALQILAFQRKQGHELSKDFEKTYLDVLMGQRSGRSPKLGNCSLIPSELRAPSSAPSTEWFKFLQNLGNLQISNAYREEWSIDAPRRAQIIDACSQRSTSSYWQIRRDFQIPDEYRFNLVNYERRDPDVDLQEYLQQQERKTLANFRNWKQLEKIIGTGHPIQTLDEAARLITLIKDDEKLSDQLADLLPEASDKAITQLCELDFTTAAKISLEAMYRILPHMNQGMGFFDACQQESLPEIGVPPAGDRVPPFDEMYNPVVNRVLSQSRKLINAVIDEYGMPAKIRVELARDLGKGRELRERIKLDQLDKSKQNDQRAEDFRAEFQQAPRGDQSLRYRLWKEQNCTCPYSGRMIPVNSVLSEDTQIDHILPISQSFDNSLSNKVLCFTEENAQKSNRTPFEYLDAADFQRLEAISGNWPEAKRNKLLHKSFGKVAEEWKSRALNDTRYLTSALADHLRHHLPDSKIQTVNGRITGYLRKQWGLEKDRDKHTHHAVDAIVVACTTPAIVQQVTLYHQDIRRYKKLGEKRPTPWPETFRQDVLDVEEEIFITRQPKKVSGGIQTKDTLRKHRSKPDRQRVALTKVKLADLERLVEKDASNRNLYEHLKQCLEESGDQPTKAFKAPFYMPSGPEAKQRPILSKVTLLREKPEPPKQLTELSGGRRYDSMAQGRLDIYRYKPGGKRKDEYRVVLQRMIDLMRGEENVHVFQKGVPYDQGPEIEQNYTFLFSLYFDDLVEFQRSADSEVIRGYYRTFNIANGQLKISTYLEGRQDFDFFGANRLAHFAKVQVNLLGKVIK

SEQ ID NO: 814 - protein, 1011 aa, uncultured delta proteobacterium HF0070_07E19; identical to SEQ ID NO: 813

SEQ ID NO: 815 - protein, 1120 aa, Veillonella sp.
MGFKANLVNLFTDEDIEVILPEEKEFKSINLHEGIYEDVRDAYEDAWGDRFAIVDQCKVLHDIIVISSIIKPGQSLSEAKIESYNQHKEDLVLLKSVLKEDRKLYDDMFVVDTDKGTNYVKYTKQGVNGNTSATQEEFYKYVRKVVSVLPETEHTRRIVQKLEEGTFLPLQRISKNGVVPYQLHKEELVRILDKATVNFPFLNKVENGLTVADKIISILEFKIPYYVGPLNPTHSIENGGFAWVVRKEAGQVLPWNFEQKVDVQASAVKFIENLTNKCTYLIDQDVLPKYSLLYAEFSLLNELNNIRVNDKPLPADVKQAFIRDHFISLQDSKTATKKVVAKYLVDNNYVSQPPIITGMDQQIATKLTSHRDMTRILGEHFDHAMAEDIIRYITIFGESKDMLRQVLKNYYGDRLTTEQIKKLGKLTYTGWGRLSKKFLSDIWGMKKNDDDAEAGTIIEHMREGQENLMQLLSSSYSFIDVVQEYVTNVLGEKEKTAFEMLEDLSLSPMVKRSVWQTLRILDEIVSIRKELPKKIFVEVARTNKADKKRTQSRKALLEELYKQIKDEDVHVLQQELESKEDSALNSKKLYLYFTQMGRCMYSGRRIDIHELFTDKYDIDHIYPRSLTKDDSWHNIVLVEKQLNAEKTDRFPILSAIQSKQKGFWKLLWDRGFISEKKYDRLVRTTDLTDEELNQFINRQMVSTNQSVKAVTTLLHQLYPETEVVFSKAENVSDFRHDYDFVKVRSINHHHHAKDAYLNIVVGNVYHEKFTKNFLSFAKQKGTRRTYNLTKIFEYEIKLTEESKKVIWDPNIHMDIVKKMMKSNDVRVTQRAVPQKGGLSDETIYKKGIAKRGVYLPLKSSDERVRDVEKYGGRTSITISEYIILNIRDTSDQDRIEIFSLPLYIAGKKDIHKAIEEAYLSTCKKPASVVDIQILYRGLYIGSKVNINGFTYYMGGKTGSNVSIDSAVDVVMDITSSVYIKLLEKVAIKKIENPKTFRIENIKTSYNHKEVTVSKEQNIALYQELLKKLDTPLFSKMKGNKLEEFRTVGFDTFIALSLEEQASVLLEVLNVLTNFKTKRDITKIGMTSSRSTLGINISNTEQFSVITTSITGLYEQEIKIK

SEQ ID NO: 816 - protein, 983 aa, Verminephrobacter aporrectodeae
MRRRRDRLLKRKARMHDQLMRHGFFPADAAGRKVLERLNPYQLRAKGLHQALTPGEFARALFHINQRRGFQSNRKTDRKDNESGALKQAISELRAQIHDSGCATVGEWFWKERMQQKPEGVHRQGVRARYRETPYTTDEGRQRIDKRYDLYVDRAMIEQEFDALWAVQAALQPGLFTDAACKELRYTLLFQRKLRPVKPGRCTLLPEEERAPLALPSTQRFRILQEVNHLRLLDEALREVPLTLAQRDALVAALESQGKLGFAPMRKLLKLPGTVKFNLEDEKRTELKGNATSAILARKDLFGPAWAGFDAALQDEIVWQLVSEEGEGRLIAWLQQHTGVDEARAEAIADTSLPEGYGSLSRKALERIVPALQREVCSYDKAVQAAGFAHHSDLGFDFEHSGDEVQQVGERIIASTGEVRPLFAFKQLPYYGKALQRHVAFGSGKPEDPEEKRHGKIANPTVHIGLNQVRTVVNALIRRYGRPSEVVVELARDLKQSREQQQETQRKQAENQRRNTRIRERIAETLGISPERVRSSDIQKWILWEELSFDVVDRRCPYSGEQISTTMLLSPKVEIEHILPFSQTLDDSLNNRTVALREANRIKRNRTPWDARADFEARGWSYEGILHRAERMPLRKRYRFAPDGYQRWLGEDKDFLARALNDTRYLSRVAANYLRLVCPKPQGVRVIPGRMTAMLRAKFGLNDVLGLDGEKNRNDHRHHAVDACVIGVTDQGLMQRFARASAQAREDGLTRLVQDMPLPWPSYRDHVERAVRHIWVSHKPDHGFEGAMMEETAYGIRKDGSIKPRRKADGSAGREVVNLIRITESRQPVRHGVDSQGQPLPYKGYVGGSNYCIEITANDQGKWEGAVISTFEAYRIVRASGWGRLRHCSHGQNGRPLMMRLMIGDAVRLALDGSEKTMRVVKISANGQVFLVAPNEANVDARNRDKADPFAYVSKKAGSFQSAKARQVSISPIGELRDPGFKG

SEQ ID NO: 817 - protein, 183 aa, Salmonella typhimurium
MPPAFITGVTSLSDVELDHEYWMRHALTLAKRAWDEREVPVGAVLVHNHRVIGEGWNRPIGRHDPTAHAEIMALRQGGLVLQNYRLLDTTLYVTLEPCVMCAGAMVHSRIGRVVFGARDAKTGAAGSLIDVLHHPGMNHRVEIIEGVLRDECATLLSDFFRMRRQEIKALKKADRAEGAGPAV

SEQ ID NO: 818 - protein, 164 aa, Shewanella putrefaciens
MDEYWMQVAMQMAEKAEAAGEVPVGAVLVKDGQQIATGYNLSISQHDPTAHAEILCLRSAGKKLENYRLLDATLYITLEPCAMCAGAMVHSRIARVVYGARDEKTGAAGTVVNLLQHPAFNHQVEVTSGVLAEACSAQLSRFFKRRRDEKKALKLAQRAQQGIE

SEQ ID NO: 819 - protein, 173 aa, Haemophilus influenzae
MDAAKVRSEFDEKMMRYALELADKAEALGEIPVGAVLVDDARNIIGEGWNLSIVQSDPTAHAEIIALRNGAKNIQNYRLLNSTLYVTLEPCTMCAGAILHSRIKRLVFGASDYKTGAIGSRFHFFDDYKMNHTLEITSGVLAEECSQKLSTFFQKRREEKKIEKALLKSLSDK

SEQ ID NO: 820 - protein, 161 aa, Caulobacter crescentus
MRTDESEDQDHRMMRLALDAARAAAEAGETPVGAVILDPSTGEVIATAGNGPIAAHDPTAHAEIAAMRAAAAKLGNYRLTDLTLVVTLEPCAMCAGAISHARIGRVVFGADDPKGGAVVHGPKFFAQPTCHWRPEVTGGVLADESADLLRGFFRARRKAKI

SEQ ID NO: 821 - protein, 179 aa, Geobacter sulfurreducens
MSSLKKTPIRDDAYWMGKAIREAAKAAARDEVPIGAVIVRDGAVIGRGHNLREGSNDPSAHAEMIAIRQAARRSANWRLTGATLYVTLEPCLMCMGAIILARLERVVFGCYDPKGGAAGSLYDLSADPRLNHQVRLSPGVCQEECGTMLSDFFRDLRRRKKAKATPALFIDERKVPPEP

SEQ ID NO: 822 - protein, 198 aa, Artificial sequence [sequence omitted]

SEQ ID NO: 823 - protein, 188 aa, Artificial sequence
  Synthetic polypeptide
MDSLLMNRRKFLYQFKNVRWAKGRRETYLCYVVKRRDSATSFSLDFGYLRNKNGCHVELLFLRYISDWDLDPGRCYRVTWFTSWSPCYDCARHVADFLRGNPNLSLRIFTARLYFCEDRKAEPEGLRRLHRAGVQIAIMTFKENHERTFKAWEGLHENSVRLSRQLRRILLPLYEVDDLRDAFRTLGL

SEQ ID NO: 824 - protein, 198 aa, Artificial sequence [sequence omitted]

SEQ ID NO: 825 - protein, 7 aa, Artificial sequence
  Synthetic polypeptide
PKKKRKV

SEQ ID NO: 826 - protein, 16 aa, Artificial sequence
  Synthetic polypeptide
KRPAATKKAGQAKKKK

SEQ ID NO: 827 - protein, 9 aa, Artificial sequence
  Synthetic polypeptide
PAAKRVKLD

SEQ ID NO: 828 - protein, 11 aa, Artificial sequence
  Synthetic polypeptide
RQRRNELKRSP

SEQ ID NO: 829 - protein, 38 aa, Artificial sequence
  Synthetic polypeptide
NQSSNFGPMKGGNFGGRSSGPYGGGGQYFAKPRNQGGY

SEQ ID NO: 830 - protein, 42 aa, Artificial sequence
  Synthetic polypeptide
RMRIZFKNKGKDTAELRRRRVEVSVELRKAKKDEQILKRRNV

SEQ ID NO: 831 - protein, 8 aa, Artificial sequence
  Synthetic polypeptide
VSRKRPRP

SEQ ID NO: 832 - protein, 8 aa, Artificial sequence
  Synthetic polypeptide
PPKKARED

SEQ ID NO: 833 - protein, 8 aa, Artificial sequence
  Synthetic polypeptide
PQPKKKPL

SEQ ID NO: 834 - protein, 12 aa, Artificial sequence
  Synthetic polypeptide
SALIKKKKKMAP

SEQ ID NO: 835 - protein, 5 aa, Artificial sequence
  Synthetic polypeptide
DRLRR

SEQ ID NO: 836 - protein, 7 aa, Artificial sequence
  Synthetic polypeptide
PKQKKRK

SEQ ID NO: 837 - protein, 10 aa, Artificial sequence
  Synthetic polypeptide
RKLKKKIKKL

SEQ ID NO: 838 - protein, 10 aa, Artificial sequence
  Synthetic polypeptide
REKKKFLKRR

SEQ ID NO: 839 - protein, 20 aa, Artificial sequence
  Synthetic polypeptide
KRKGDEVDGVDEVAKKKSKK

SEQ ID NO: 840 - protein, 17 aa, Artificial sequence
  Synthetic polypeptide
RKCLQAGMNLEARKTKK

SEQ ID NO: 841 - protein, 20 aa, Artificial sequence
  Synthetic polypeptide
  Misc_feature (4)..(4): lysine, histidine, or arginine
  Misc_feature (8)..(8): lysine, histidine, or arginine
  Misc_feature (11)..(11): lysine, histidine, or arginine
  Misc_feature (15)..(15): lysine, histidine, or arginine
  Misc_feature (19)..(19): lysine, histidine, or arginine
GLFXALLXLLXSLWXLLLXA

SEQ ID NO: 842 - protein, 20 aa, Artificial sequence
  Synthetic polypeptide
GLFHALLHLLHSLWHLLLHA

SEQ ID NO: 843 - protein, 5 aa, Artificial sequence
  Synthetic polypeptide
GSGGS

SEQ ID NO: 844 - protein, 6 aa, Artificial sequence
  Synthetic polypeptide
GGSGGS

SEQ ID NO: 845 - protein, 4 aa, Artificial sequence
  Synthetic polypeptide
GGGS

SEQ ID NO: 846 - protein, 4 aa, Artificial sequence
  Synthetic polypeptide
GGSG

SEQ ID NO: 847 - protein, 5 aa, Artificial sequence
  Synthetic polypeptide
GGSGG

SEQ ID NO: 848 - protein, 5 aa, Artificial sequence
  Synthetic polypeptide
GSGSG

SEQ ID NO: 849 - protein, 5 aa, Artificial sequence
  Synthetic polypeptide
GSGGG

SEQ ID NO: 850 - protein, 5 aa, Artificial sequence
  Synthetic polypeptide
GGGSG

SEQ ID NO: 851 - protein, 5 aa, Artificial sequence
  Synthetic polypeptide
GSSSG

SEQ ID NO: 852 - protein, 5 aa, Artificial sequence
  Synthetic polypeptide
GGGGS

SEQ ID NO: 853 - protein, 16 aa, Artificial sequence
  Synthetic polypeptide
RQIKIWFQNRRMKWKK

SEQ ID NO: 854 - protein, 11 aa, Artificial sequence
  Synthetic polypeptide
YGRKKRRQRRR

SEQ ID NO: 855 - protein, 12 aa, Artificial sequence
  Synthetic polypeptide
RRQRRTSKLMKR

SEQ ID NO: 856 - protein, 27 aa, Artificial sequence
  Synthetic polypeptide
GWTLNSAGYLLGKINLKALAALAKKIL

SEQ ID NO: 857 - protein, 33 aa, Artificial sequence
  Synthetic polypeptide
KALAWEAKLAKALAKALAKHLAKALAKALKCEA

SEQ ID NO: 858 - protein, 9 aa, Artificial sequence
  Synthetic polypeptide
RKKRRQRRR

SEQ ID NO: 859 - protein, 8 aa, Artificial sequence
  Synthetic polypeptide
RKKRRQRR

SEQ ID NO: 860 - protein, 11 aa, Artificial sequence
  Synthetic polypeptide
YARAAARQARA

SEQ ID NO: 861 - protein, 11 aa, Artificial sequence
  Synthetic polypeptide
THRLPRRRRRR

SEQ ID NO: 862 - protein, 11 aa, Artificial sequence
  Synthetic polypeptide
GGRRARRRRRR

SEQ ID NO: 863 - protein, 990 aa, Artificial Sequence
  Synthetic sequence
MDKKYSIGLAIGTNSVGWAVITDEYKVPSKKFKVLGNTDRHSIKKNLIGALLFDSGETAEATRLKRTARRRYTRRKNRICYLQEIFSNEMAKVDDSFFHRLEESFLVEEDKKHERHPIFGNIVDEVAYHEKYPTIYHLRKKLVDSTDKADLRLIYLALAHMIKFRGHFLIEGDLNPDNSDVDKLFIQLVQTYNQLFEENPINASGVDAKAILSARLSKSRRLENLIAQLPGEKKNGLFGNLIALSLGLTPNFKSNFDLAEDAKLQLSKDTYDDDLDNLLAQIGDQYADLFLAAKNLSDAILLSDILRVNTEITKAPLSASMIKRYDEHHQDLTLLKALVRQQLPEKYKEIFFDQSKNGYAGYIDGGASQEEFYKFIKPILEKMDGTEELLVKLNREDLLRKQRTFDNGSIPHQIHLGELHAILRRQEDFYPFLKDNREKIEKILTFRIPYYVGPLARGNSRFAWMTRKSEETITPWNFEEVVDKGASAQSFIERMTNFDKNLTSQKAQVSGQGDSLHEHIANLAGSPAIKKGILQTVKVVDELVKVMGRHKPENIVIEMARENQTTQKGQKNSRERMKRIEEGIKELASDNLTKAERGGLSELDKAGFIKRQLVETRQITKHVAQILDSRMNTKYDENDKLIREVKVITLKSKLVSDFRKDFQFYKVREINNYHHAHDAYLNAVVGTALIKKYPKLESEFVASTVRKVLSMPQVNIVKKTEVQTGGFSKESILPKRNSDKLIARKKDWDPKKYGGFDSPTVAYSVLVVAKVEKGKSKKLKSVKELLGITIMERSSFEKNPIDFLEAKGYKEVKKDLIIKLPKYSLFELENGRKRMLASAGELQKGNELALPSKYVNFLYLASHYEKLKGSPEDNEQKQLFVEQHKHYLDEIIEQISEFSKRVILADANLDKVLSAYNKHRDKPIREQAENIIHLFTLTNLGAPAAFKYFDTTIDRKRYTSTKEVLDATLIHQSITGLYETRIDLSQLGGD

SEQ ID NO: 864 - protein, 874 aa, Artificial Sequence
  Synthetic sequence
MDKKYSIGLAIGTNSVGWAVITDEYKVPSKKFKVLGNTDRHSIKKNLIGALLFDSGETAEATRLKRTARRRYTRRKNRICYLQEIFSNEMAKVDDSFFHRLEESFLVEEDKKHERHPIFGNIVDEVAYHEKYPTIYHLRKKLVDSTDKADLRLIYLALAHMIKFRGHFLIEGDLNPDNSTSDAILLSDILRVNTEITKAPLSASMIKRYDEHHQDLTLLKALVRQQLPEKYKEIFFDQSKNGYAGYIDGGASQEEFYKFIKPILEKMDGTEELLVKLNREDLLRKQRTFDNGSIPHQIHLGELHAILRRQEDFYPFLKDNREKIEKILTFRIPYYVGPLARGNSRFAWMTRKSEETITPWNFEEVVDKGASAQSFIERMTNFDKNLTSQKAQVSGQGDSLHEHIANLAGSPAIKKGILQTVKVVDELVKVMGRHKPENIVIEMARENQTTQKGQKNSRERMKRIEEGIKELASDNLTKAERGGLSELDKAGFIKRQLVETRQITKHVAQILDSRMNTKYDENDKLIREVKVITLKSKLVSDFRKDFQFYKVREINNYHHAHDAYLNAVVGTALIKKYPKLESEFVASTVRKVLSMPQVNIVKKTEVQTGGFSKESILPKRNSDKLIARKKDWDPKKYGGFDSPTVAYSVLVVAKVEKGKSKKLKSVKELLGITIMERSSFEKNPIDFLEAKGYKEVKKDLIIKLPKYSLFELENGRKRMLASAGELQKGNELALPSKYVNFLYLASHYEKLKGSPEDNEQKQLFVEQHKHYLDEIIEQISEFSKRVILADANLDKVLSAYNKHRDKPIREQAENIIHLFTLTNLGAPAAFKYFDTTIDRKRYTSTKEVLDATLIHQSITGLYETRIDLSQLGGD

SEQ ID NO: 865 - protein, 712 aa, Streptococcus pyogenes
MDKKYSIGLDIGTNSVGWAVITDEYKVPSKKFKVLGNTDRHSIKKNLIGALLFDSGETAEATRLKRTARRRYTRRKNRICYLQEIFSNEMAKVDDSFFHRLEESFLVEEDKKHERHPIFGNIVDEVAYHEKYPTIYHLRKKLVDSTDKADLRLIYLALAHMIKFRGHFLIEGDLNPDNSDVDKLFIQLVQTYNQLFEENPINASGVDAKAILSARLSKSRRLENLIAQLPGEKKNGLFGNLIALSLGLTPNFKSNFDLAEDAKLQLSKDTYDDDLDNLLAQIGDQYADLFLAAKNLSDAILLSDILRVNTEITKAPLSASMIKRYDEHHQDLTLLKALVRQQLPEKYKEIFFDQSKNGYAGYIDGGASQEEFYKFIKPILEKMDGTEELLVKLNREDLLRKQRTFDNGSIPHQIHLGELHAILRRQEDFYPFLKDNREKIEKILTFRIPYYVGPLARGNSRFAWMTRKSEETITPWNFEEVVDKGASAQSFIERMTNFDKNLPNEKVLPKHSLLYEYFTVYNELTKVKYVTEGMRKPAFLSGEQKKAIVDLLFKTNRKVTVKQLKEDYFKKIECFDSVEISGVEDRFNASLGTYHDLLKIIKDKDFLDNEENEDILEDIVLTLTLFEDREMIEERLKTYAHLFDDKVMKQLKRRRYTGWGRLSRKLINGIRDKQSGKTILDFLKSDGFANRNFMQLIHDDSLTFKEDIQKAQ

SEQ ID NO: 866 - protein, 508 aa, Artificial Sequence
  Synthetic sequence
MDKKYSIGLAIGTNSVGWAVITDEYKVPSKKFKVLGNTDRHSIKKNLIGALLFDSGETAEATRLKRTARRRYTRRKNRICYLQEIFSNEMAKVDDSFFHRLEESFLVEEDKKHERHPIFGNIVDEVAYHEKYPTIYHLRKKLVDSTDKADLRLIYLALAHMIKFRGHFLIEGDLNPDNSDVDKLFIQLVQTYNQLFEENPINASGVDAKAILSARLSKSRRLENLIAQLPGEKKNGLFGNLIALSLGLTPNFKSNFDLAEDAKLQLSKDTYDDDLDNLLAQIGDQYADLFLAAKNLSDAILLSDILRVNTEITKAPLSASMIKRYDEHHQDLTLLKALVRQQLPEKYKEIFFDQSKNGYAGYIDGGASQEEFYKFIKPILEKMDGTEELLVKLNREDLLRKQRTFDNGSIPHQIHLGELHAILRRQEDFYPFLKDNREKIEKILTFRIPYYVGPLARGNSRFAWMTRKSEETITPWNFEEVVDKGASAQSFIERMTNFDKNLTSQKAQ

SEQ ID NO: 867 - protein, 656 aa, Streptococcus pyogenes
VSGQGDSLHEHIANLAGSPAIKKGILQTVKVVDELVKVMGRHKPENIVIEMARENQTTQKGQKNSRERMKRIEEGIKELGSQILKEHPVENTQLQNEKLYLYYLQNGRDMYVDQELDINRLSDYDVDHIVPQSFLKDDSIDNKVLTRSDKNRGKSDNVPSEEVVKKMKNYWRQLLNAKLITQRKFDNLTKAERGGLSELDKAGFIKRQLVETRQITKHVAQILDSRMNTKYDENDKLIREVKVITLKSKLVSDFRKDFQFYKVREINNYHHAHDAYLNAVVGTALIKKYPKLESEFVYGDYKVYDVRKMIAKSEQEIGKATAKYFFYSNIMNFFKTEITLANGEIRKRPLIETNGETGEIVWDKGRDFATVRKVLSMPQVNIVKKTEVQTGGFSKESILPKRNSDKLIARKKDWDPKKYGGFDSPTVAYSVLVVAKVEKGKSKKLKSVKELLGITIMERSSFEKNPIDFLEAKGYKEVKKDLIIKLPKYSLFELENGRKRMLASAGELQKGNELALPSKYVNFLYLASHYEKLKGSPEDNEQKQLFVEQHKHYLDEIIEQISEFSKRVILADANLDKVLSAYNKHRDKPIREQAENIIHLFTLTNLGAPAAFKYFDTTIDRKRYTSTKEVLDATLIHQSITGLYETRIDLSQLGGD

SEQ ID NO: 868 - protein, 482 aa, Artificial Sequence
  Synthetic sequence
VSGQGDSLHEHIANLAGSPAIKKGILQTVKVVDELVKVMGRHKPENIVIEMARENQTTQKGQKNSRERMKRIEEGIKELASDNLTKAERGGLSELDKAGFIKRQLVETRQITKHVAQILDSRMNTKYDENDKLIREVKVITLKSKLVSDFRKDFQFYKVREINNYHHAHDAYLNAVVGTALIKKYPKLESEFVASTVRKVLSMPQVNIVKKTEVQTGGFSKESILPKRNSDKLIARKKDWDPKKYGGFDSPTVAYSVLVVAKVEKGKSKKLKSVKELLGITIMERSSFEKNPIDFLEAKGYKEVKKDLIIKLPKYSLFELENGRKRMLASAGELQKGNELALPSKYVNFLYLASHYEKLKGSPEDNEQKQLFVEQHKHYLDEIIEQISEFSKRVILADANLDKVLSAYNKHRDKPIREQAENIIHLFTLTNLGAPAAFKYFDTTIDRKRYTSTKEVLDATLIHQSITGLYETRIDLSQLGGD

SEQ ID NO: 869 - protein, 196 aa, Artificial Sequence
  Synthetic sequence
QLVKSELEEKKSELRHKLKYVPHEYIELIEIARNSTQDRILEMKVMEFFMKVYGYRGKHLGGSRKPDGAIYTVGSPIDYGVIVDTKAYSGGYNLPIGQADEMQRYVEENQTRNKHINPNEWWKVYPSSVTEFKFLFVSGHFKGNYKAQLTRLNHITNCNGAVLSVEELLIGGEMIKAGTLTLEEVRRKFNNGEINF

SEQ ID NO: 870 - protein, 196 aa, Artificial Sequence
  Synthetic sequence
QLVKSELEEKKSELRHKLKYVPHEYIELIEIARNPTQDRILEMKVMEFFMKVYGYRGEHLGGSRKPDGAIYTVGSPIDYGVIVDTKAYSGGYNLPIGQADEMQRYVEENQTRNKHINPNEWWKVYPSSVTEFKFLFVSGHFKGNYKAQLTRLNHITNCNGAVLSVEELLIGGEMIKAGTLTLEEVRRKFNNGEINF

SEQ ID NO: 871 - protein, 1252 aa, Artificial Sequence
  Synthetic sequence
MDKKYSIGLDIGTNSVGWAVITDEYKVPSKKFKVLGNTDRHSIKKNLIGALLFDSGETAEATRLKRTARRRYTRRKNRICYLQEIFSNEMAKVDDSFFHRLEESFLVEEDKKHERHPIFGNIVDEVAYHEKYPTIYHLRKKLVDSTDKADLRLIYLALAHMIKFRGHFLIEGDFLAAKNLSDAILLSDILRVNTEITKAPLSASMIKRYDEHHQDLTLLKALVRQQLPEKYKEIFFDQSKNGYAGYIDGGASQEEFYKFIKPILEKMDGTEELLVKLNREDLLRKQRTFDNGSIPHQIHLGELHAILRRQEDFYPFLKDNREKIEKILTFRIPYYVGPLARGNSRFAWMTRKSEETITPWNFEEVVDKGASAQSFIERMTNFDKNLPNEKVLPKHSLLYEYFTVYNELTKVKYVTEGMRKPAFLSGEQKKAIVDLLFKTNRKVTVKQLKEDYFKKIECFDSVEISGVEDRFNASLGTYHDLLKIIKDKDFLDNEENEDILEDIVLTLTLFEDREMIEERLKTYAHLFDDKVMKQLKRRRYTGWGRLSRKLINGIRDKQSGKTILDFLKSDGFANRNFMQLIHDDSLTFKEDIQKAQVSGQGDSLHEHIANLAGSPAIKKGILQTVKVVDELVKVMGRHKPENIVIEMARENQTTQKGQKNSRERMKRIEEGIKELGSQILKEHPVENTQLQNEKLYLYYLQNGRDMYVDQELDINRLSDYDVDHIVPQSFLKDDSIDNKVLTRSDKNRGKSDNVPSEEVVKKMKNYWRQLLNAKLITQRKFDNLTKAERGGLSELDKAGFIKRQLVETRQITKHVAQILDSRMNTKYDENDKLIREVKVITLKSKLVSDFRKDFQFYKVREINNYHHAHDAYLNAVVGTALIKKYPKLESEFVYGDYKVYDVRKMIAKSEQEIGKATAKYFFYSNIMNFFKTEITLANGEIRKRPLIETNGETGEIVWDKGRDFATVRKVLSMPQVNIVKKTEVQTGGFSKESILPKRNSDKLIARKKDWDPKKYGGFDSPTVAYSVLVVAKVEKGKSKKLKSVKELLGITIMERSSFEKNPIDFLEAKGYKEVKKDLIIKLPKYSLFELENGRKRMLASAGELQKGNELALPSKYVNFLYLASHYEKLKGSPEDNEQKQLFVEQHKHYLDEIIEQISEFSKRVILADANLDKVLSAYNKHRDKPIREQAENIIHLFTLTNLGAPAAFKYFDTTIDRKRYTSTKEVLDATLIHQSITGLYETRIDLSQLGGD

SEQ ID NO: 872 - protein, 1252 aa, Artificial Sequence; identical to SEQ ID NO: 871
  Synthetic sequence

SEQ ID NO: 873 - protein, 1235 aa, Artificial Sequence
  Synthetic sequence
MDKKYSIGLDIGTNSVGWAVITDEYKVPSKKFKVLGNTDRHSIKKNLIGALLFDSGETAEATRLKRTARRRYTRRKNRICYLQEIFSNEMAKVDDSFFHRLEESFLVEEDKKHERHPIFGNIVDEVAYHEKYPTIYHLRKKLVDSTDKADLRLIYLALAHMIKFRGHFLIEGDRVNTEITKAPLSASMIKRYDEHHQDLTLLKALVRQQLPEKYKEIFFDQSKNGYAGYIDGGASQEEFYKFIKPILEKMDGTEELLVKLNREDLLRKQRTFDNGSIPHQIHLGELHAILRRQEDFYPFLKDNREKIEKILTFRIPYYVGPLARGNSRFAWMTRKSEETITPWNFEEVVDKGASAQSFIERMTNFDKNLPNEKVLPKHSLLYEYFTVYNELTKVKYVTEGMRKPAFLSGEQKKAIVDLLFKTNRKVTVKQLKEDYFKKIECFDSVEISGVEDRFNASLGTYHDLLKIIKDKDFLDNEENEDILEDIVLTLTLFEDREMIEERLKTYAHLFDDKVMKQLKRRRYTGWGRLSRKLINGIRDKQSGKTILDFLKSDGFANRNFMQLIHDDSLTFKEDIQKAQVSGQGDSLHEHIANLAGSPAIKKGILQTVKVVDELVKVMGRHKPENIVIEMARENQTTQKGQKNSRERMKRIEEGIKELGSQILKEHPVENTQLQNEKLYLYYLQNGRDMYVDQELDINRLSDYDVDHIVPQSFLKDDSIDNKVLTRSDKNRGKSDNVPSEEVVKKMKNYWRQLLNAKLITQRKFDNLTKAERGGLSELDKAGFIKRQLVETRQITKHVAQILDSRMNTKYDENDKLIREVKVITLKSKLVSDFRKDFQFYKVREINNYHHAHDAYLNAVVGTALIKKYPKLESEFVYGDYKVYDVRKMIAKSEQEIGKATAKYFFYSNIMNFFKTEITLANGEIRKRPLIETNGETGEIVWDKGRDFATVRKVLSMPQVNIVKKTEVQTGGFSKESILPKRNSDKLIARKKDWDPKKYGGFDSPTVAYSVLVVAKVEKGKSKKLKSVKELLGITIMERSSFEKNPIDFLEAKGYKEVKKDLIIKLPKYSLFELENGRKRMLASAGELQKGNELALPSKYVNFLYLASHYEKLKGSPEDNEQKQLFVEQHKHYLDEIIEQISEFSKRVILADANLDKVLSAYNKHRDKPIREQAENIIHLFTLTNLGAPAAFKYFDTTIDRKRYTSTKEVLDATLIHQSITGLYETRIDLSQLGGD

SEQ ID NO: 874 - protein, 1235 aa, Artificial Sequence; identical to SEQ ID NO: 873
  Synthetic sequence

SEQ ID NO: 875 - protein, 1246 aa, Artificial Sequence
  Synthetic sequence
MDKKYSIGLDIGTNSVGWAVITDEYKVPSKKFKVLGNTDRHSIKKNLIGALLFDSGETAEATRLKRTARRRYTRRKNRICYLQEIFSNEMAKVDDSFFHRLEESFLVEEDKKHERHPIFGNIVDEVAYHEKYPTIYHLRKKLVDSTDKADLRLIYLALAHMIKFRGHFLIEGDLSDAILLSDILRVNTEITKAPLSASMIKRYDEHHQDLTLLKALVRQQLPEKYKEIFFDQSKNGYAGYIDGGASQEEFYKFIKPILEKMDGTEELLVKLNREDLLRKQRTFDNGSIPHQIHLGELHAILRRQEDFYPFLKDNREKIEKILTFRIPYYVGPLARGNSRFAWMTRKSEETITPWNFEEVVDKGASAQSFIERMTNFDKNLPNEKVLPKHSLLYEYFTVYNELTKVKYVTEGMRKPAFLSGEQKKAIVDLLFKTNRKVTVKQLKEDYFKKIECFDSVEISGVEDRFNASLGTYHDLLKIIKDKDFLDNEENEDILEDIVLTLTLFEDREMIEERLKTYAHLFDDKVMKQLKRRRYTGWGRLSRKLINGIRDKQSGKTILDFLKSDGFANRNFMQLIHDDSLTFKEDIQKAQVSGQGDSLHEHIANLAGSPAIKKGILQTVKVVDELVKVMGRHKPENIVIEMARENQTTQKGQKNSRERMKRIEEGIKELGSQILKEHPVENTQLQNEKLYLYYLQNGRDMYVDQELDINRLSDYDVDHIVPQSFLKDDSIDNKVLTRSDKNRGKSDNVPSEEVVKKMKNYWRQLLNAKLITQRKFDNLTKAERGGLSELDKAGFIKRQLVETRQITKHVAQILDSRMNTKYDENDKLIREVKVITLKSKLVSDFRKDFQFYKVREINNYHHAHDAYLNAVVGTALIKKYPKLESEFVYGDYKVYDVRKMIAKSEQEIGKATAKYFFYSNIMNFFKTEITLANGEIRKRPLIETNGETGEIVWDKGRDFATVRKVLSMPQVNIVKKTEVQTGGFSKESILPKRNSDKLIARKKDWDPKKYGGFDSPTVAYSVLVVAKVEKGKSKKLKSVKELLGITIMERSSFEKNPIDFLEAKGYKEVKKDLIIKLPKYSLFELENGRKRMLASAGELQKGNELALPSKYVNFLYLASHYEKLKGSPEDNEQKQLFVEQHKHYLDEIIEQISEFSKRVILADANLDKVLSAYNKHRDKPIREQAENIIHLFTLTNLGAPAAFKYFDTTIDRKRYTSTKEVLDATLIHQSITGLYETRIDLSQLGGD

SEQ ID NO: 876 - protein, 1246 aa, Artificial Sequence; identical to SEQ ID NO: 875
  Synthetic sequence

SEQ ID NO: 877 - protein, 1187 aa, Artificial Sequence
  Synthetic sequence
MDKKYSIGLDIGTNSVGWAVITDEYKVPSKKFKVLGNTDRHSIKKNLIGALLFDSGETAEATRLKRTARRRYTRRKNRICYLQEIFSNEMAKVDDSFFHRLEESFLVEEDKKHERHPIFGNIVDEVAYHEKYPTIYHLRKKLVDSTDKADLRLIYLALAHMIKFRGHFLIEGDLNPDNSDVDKLFIQLVQTYNQLFEENPINASGVDAKAILSARLSKSRRLENLIAQLPGEKKNGLFGNLIALSLGLTPNFKSNFDLAEDAKLQLSKDTYDDDLDNLLAQIGDQYADLFLAAKNLSDAILLSDILRVNTEITKAPLSASMIKRYDEHHQDLTLLKALVRQQLPEKYKEIFFDQSKNGYAGYIDGGASQEEFYKFIKPILEKMDGTEELLVKLNREDLLRKQRTFDNGSIPHQIHLGELHAILRRQEDFYPFLKDNREKIEKILTFRIPYYVGPLARGNSRFAWMTRKSEETITPWNFEEVVDKGASAQSFIERMTNFDKNLPNEKVLPKHSLLYEYFTVYTFKEDIQKAQVSGQGDSLHEHIANLAGSPAIKKGILQTVKVVDELVKVMGRHKPENIVIEMARENQTTQKGQKNSRERMKRIEEGIKELGSQILKEHPVENTQLQNEKLYLYYLQNGRDMYVDQELDINRLSDYDVDHIVPQSFLKDDSIDNKVLTRSDKNRGKSDNVPSEEVVKKMKNYWRQLLNAKLITQRKFDNLTKAERGGLSELDKAGFIKRQLVETRQITKHVAQILDSRMNTKYDENDKLIREVKVITLKSKLVSDFRKDFQFYKVREINNYHHAHDAYLNAVVGTALIKKYPKLESEFVYGDYKVYDVRKMIAKSEQEIGKATAKYFFYSNIMNFFKTEITLANGEIRKRPLIETNGETGEIVWDKGRDFATVRKVLSMPQVNIVKKTEVQTGGFSKESILPKRNSDKLIARKKDWDPKKYGGFDSPTVAYSVLVVAKVEKGKSKKLKSVKELLGITIMERSSFEKNPIDFLEAKGYKEVKKDLIIKLPKYSLFELENGRKRMLASAGELQKGNELALPSKYVNFLYLASHYEKLKGSPEDNEQKQLFVEQHKHYLDEIIEQISEFSKRVILADANLDKVLSAYNKHRDKPIREQAENIIHLFTLTNLGAPAAFKYFDTTIDRKRYTSTKEVLDATLIHQSITGLYETRIDLSQLGGD

SEQ ID NO: 878 - protein, 1187 aa, Artificial Sequence; identical to SEQ ID NO: 877
  Synthetic sequence

SEQ ID NO: 879 - protein, 1200 aa, Artificial Sequence
  Synthetic sequence
MDKKYSIGLDIGTNSVGWAVITDEYKVPSKKFKVLGNTDRHSIKKNLIGALLFDSGETAEATRLKRTARRRYTRRKNRICYLQEIFSNEMAKVDDSFFHRLEESFLVEEDKKHERHPIFGNIVDEVAYHEKYPTIYHLRKKLVDSTDKADLRLIYLALAHMIKFRGHFLIEGDLNPDNSDVDKLFIQLVQTYNQLFEENPINASGVDAKAILSARLSKSRRLENLIAQLPGEKKNGLFGNLIALSLGLTPNFKSNFDLAEDAKLQLSKDTYDDDLDNLLAQIGDQYADLFLAAKNLSDAILLSDILRVNTEITKAPLSASMIKRYDEHHQDLTLLKALVRQQLPEKYKEIFFDQSKNGYAGYIDGGASQEEFYKFIKPILEKMDGTEELLVKLNREDLLRKQRTFDNGSIPHQIHLGELHAILRRQEDFYPFLKDNREKIEKILTFRIPYYVGPLARGNSRFAWMTRKSEETITPWNFEEVVDKGASAQSFIERMTNFDKNLPNEKVLPKHSLLYEYFTVYNELTKVKYVTEGMRKKEDIQKAQVSGQGDSLHEHIANLAGSPAIKKGILQTVKVVDELVKVMGRHKPENIVIEMARENQTTQKGQKNSRERMKRIEEGIKELGSQILKEHPVENTQLQNEKLYLYYLQNGRDMYVDQELDINRLSDYDVDHIVPQSFLKDDSIDNKVLTRSDKNRGKSDNVPSEEVVKKMKNYWRQLLNAKLITQRKFDNLTKAERGGLSELDKAGFIKRQLVETRQITKHVAQILDSRMNTKYDENDKLIREVKVITLKSKLVSDFRKDFQFYKVREINNYHHAHDAYLNAVVGTALIKKYPKLESEFVYGDYKVYDVRKMIAKSEQEIGKATAKYFFYSNIMNFFKTEITLANGEIRKRPLIETNGETGEIVWDKGRDFATVRKVLSMPQVNIVKKTEVQTGGFSKESILPKRNSDKLIARKKDWDPKKYGGFDSPTVAYSVLVVAKVEKGKSKKLKSVKELLGITIMERSSFEKNPIDFLEAKGYKEVKKDLIIKLPKYSLFELENGRKRMLASAGELQKGNELALPSKYVNFLYLASHYEKLKGSPEDNEQKQLFVEQHKHYLDEIIEQISEFSKRVILADANLDKVLSAYNKHRDKPIREQAENIIHLFTLTNLGAPAAFKYFDTTIDRKRYTSTKEVLDATLIHQSITGLYETRIDLSQLGGD

SEQ ID NO: 880 - protein, 1200 aa, Artificial Sequence; identical to SEQ ID NO: 879
  Synthetic sequence

SEQ ID NO: 881 - protein, 1226 aa, Artificial Sequence
  Synthetic sequence
MDKKYSIGLDIGTNSVGWAVITDEYKVPSKKFKVLGNTDRHSIKKNLIGALLFDSGETAEATRLKRTARRRYTRRKNRICYLQEIFSNEMAKVDDSFFHRLEESFLVEEDKKHERHPIFGNIVDEVAYHEKYPTIYHLRKKLVDSTDKADLRLIYLALAHMIKFRGHFLIEGDLNPDNSDVDKLFIQLVQTYNQLFEENPINASGVDAKAILSARLSKSRRLENLIAQLPGEKKNGLFGNLIALSLGLTPNFKSNFDLAEDAKLQLSKDTYDDDLDNLLAQIGDQYADLFLAAKNLSDAILLSDILRVNTEITKAPLSASMIKRYDEHHQDLTLLKALVRQQLPEKYKEIFFDQSKNGYAGYIDGGASQEEFYKFIKPILEKMDGTEELLVKLNREDLLRKQRTFDNGSIPHQIHLGELHAILRRQEDFYPFLKDNREKIEKILTFRIPYYVGPLARGNSRFAWMTRKSEETITPWNFEEVVDKGASAQSFIERMTNFDKNLPNEKVLPKHSLLYEYFTVYNKLINGIRDKQSGKTILDFLKSDGFANRNFMQLIHDDSLTFKEDIQKAQVSGQGDSLHEHIANLAGSPAIKKGILQTVKVVDELVKVMGRHKPENIVIEMARENQTTQKGQKNSRERMKRIEEGIKELGSQILKEHPVENTQLQNEKLYLYYLQNGRDMYVDQELDINRLSDYDVDHIVPQSFLKDDSIDNKVLTRSDKNRGKSDNVPSEEVVKKMKNYWRQLLNAKLITQRKFDNLTKAERGGLSELDKAGFIKRQLVETRQITKHVAQILDSRMNTKYDENDKLIREVKVITLKSKLVSDFRKDFQFYKVREINNYHHAHDAYLNAVVGTALIKKYPKLESEFVYGDYKVYDVRKMIAKSEQEIGKATAKYFFYSNIMNFFKTEITLANGEIRKRPLIETNGETGEIVWDKGRDFATVRKVLSMPQVNIVKKTEVQTGGFSKESILPKRNSDKLIARKKDWDPKKYGGFDSPTVAYSVLVVAKVEKGKSKKLKSVKELLGITIMERSSFEKNPIDFLEAKGYKEVKKDLIIKLPKYSLFELENGRKRMLASAGELQKGNELALPSKYVNFLYLASHYEKLKGSPEDNEQKQLFVEQHKHYLDEIIEQISEFSKRVILADANLDKVLSAYNKHRDKPIREQAENIIHLFTLTNLGAPAAFKYFDTTIDRKRYTSTKEVLDATLIHQSITGLYETRIDLSQLGGD

SEQ ID NO: 882 - protein, 1226 aa, Artificial Sequence; identical to SEQ ID NO: 881
  Synthetic sequence

SEQ ID NO: 883 - protein, 1242 aa, Artificial Sequence
  Synthetic sequence
MDKKYSIGLDIGTNSVGWAVITDEYKVPSKKFKVLGNTDRHSIKKNLIGALLFDSGETAEATRLKRTARRRYTRRKNRICYLQEIFSNEMAKVDDSFFHRLEESFLVEEDKKHERHPIFGNIVDEVAYHEKYPTIYHLRKKLVDSTDKADLRLIYLALAHMIKFRGHFLIEGDLNPDNSDVDKLFIQLVQTYNQLFEENPINASGVDAKAILSARLSKSRRLENLIAQLPGEKKNGLFGNLIALSLGLTPNFKSNFDLAEDAKLQLSKDTYDDDLDNLLAQIGDQYADLFLAAKNLSDAILLSDILRVNTEITKAPLSASMIKRYDEHHQDLTLLKALVRQQLPEKYKEIFFDQSKNGYAGYIDGGASQEEFYKFIKPILEKMDGTEELLVKLNREDLLRKQRTFDNGSIPHQIHLGELHAILRRQEDFYPFLKDNREKIEKILTFRIPYYVGPLARGNSRFAWMTRKSEETITPWNFEEVVDKGASAQSFIERMTNFDKNLPNEKVLPKHSLLYEYFTVYNELTKVKYVTEGMRKPAFLSGEQKKAIVDLLFKTNRKVTVKQLKEDYFKKIECFDSVEISGVEDRFNASLGTYHDLLKIIKDKDFLDNEENEDILEDIVLTLTLFEDREMIEERLKTYAHLFDDKVMKQLKRRRYTGWGRLSRKLINGIRDKQSGKTILDFLKSDGFANRNFMQLIHDDSLTFKEDIQKAQVSGQGDSLHEHIANLAGSPAIKKGILQTVKVVDELVKVMGRHKPENIVIEMARENQTTQKGQKNSRERGLSELDKAGFIKRQLVETRQITKHVAQILDSRMNTKYDENDKLIREVKVITLKSKLVSDFRKDFQFYKVREINNYHHAHDAYLNAVVGTALIKKYPKLESEFVYGDYKVYDVRKMIAKSEQEIGKATAKYFFYSNIMNFFKTEITLANGEIRKRPLIETNGETGEIVWDKGRDFATVRKVLSMPQVNIVKKTEVQTGGFSKESILPKRNSDKLIARKKDWDPKKYGGFDSPTVAYSVLVVAKVEKGKSKKLKSVKELLGITIMERSSFEKNPIDFLEAKGYKEVKKDLIIKLPKYSLFELENGRKRMLASAGELQKGNELALPSKYVNFLYLASHYEKLKGSPEDNEQKQLFVEQHKHYLDEIIEQISEFSKRVILADANLDKVLSAYNKHRDKPIREQAENIIHLFTLTNLGAPAAFKYFDTTIDRKRYTSTKEVLDATLIHQSITGLYETRIDLSQLGGD

SEQ ID NO: 884 - protein, 1242 aa, Artificial Sequence; identical to SEQ ID NO: 883
  Synthetic sequence

SEQ ID NO: 885 - protein, 1255 aa, Artificial Sequence
  Synthetic sequence
MDKKYSIGLDIGTNSVGWAVITDEYKVPSKKFKVLGNTDRHSIKKNLIGALLFDSGETAEATRLKRTARRRYTRRKNRICYLQEIFSNEMAKVDDSFFHRLEESFLVEEDKKHERHPIFGNIVDEVAYHEKYPTIYHLRKKLVDSTDKADLRLIYLALAHMIKFRGHFLIEGDLNPDNSDVDKLFIQLVQTYNQLFEENPINASGVDAKAILSARLSKSRRLENLIAQLPGEKKNGLFGNLIALSLGLTPNFKSNFDLAEDAKLQLSKDTYDDDLDNLLAQIGDQYADLFLAAKNLSDAILLSDILRVNTEITKAPLSASMIKRYDEHHQDLTLLKALVRQQLPEKYKEIFFDQSKNGYAGYIDGGASQEEFYKFIKPILEKMDGTEELLVKLNREDLLRKQRTFDNGSIPHQIHLGELHAILRRQEDFYPFLKDNREKIEKILTFRIPYYVGPLARGNSRFAWMTRKSEETITPWNFEEVVDKGASAQSFIERMTNFDKNLPNEKVLPKHSLLYEYFTVYNELTKVKYVTEGMRKPAFLSGEQKKAIVDLLFKTNRKVTVKQLKEDYFKKIECFDSVEISGVEDRFNASLGTYHDLLKIIKDKDFLDNEENEDILEDIVLTLTLFEDREMIEERLKTYAHLFDDKVMKQLKRRRYTGWGRLSRKLINGIRDKQSGKTILDFLKSDGFANRNFMQLIHDDSLTFKEDIQKAQVSGQGDSLHEHIANLAGSPAIKKGILQTVKVVDELVKVMGRHKPENIVIEMARENQTTQKGQKNSRERMKRIEEGIKELGSQILKEHPVENTQLQNEKLYLYYLQNGQILDSRMNTKYDENDKLIREVKVITLKSKLVSDFRKDFQFYKVREINNYHHAHDAYLNAVVGTALIKKYPKLESEFVYGDYKVYDVRKMIAKSEQEIGKATAKYFFYSNIMNFFKTEITLANGEIRKRPLIETNGETGEIVWDKGRDFATVRKVLSMPQVNIVKKTEVQTGGFSKESILPKRNSDKLIARKKDWDPKKYGGFDSPTVAYSVLVVAKVEKGKSKKLKSVKELLGITIMERSSFEKNPIDFLEAKGYKEVKKDLIIKLPKYSLFELENGRKRMLASAGELQKGNELALPSKYVNFLYLASHYEKLKGSPEDNEQKQLFVEQHKHYLDEIIEQISEFSKRVILADANLDKVLSAYNKHRDKPIREQAENIIHLFTLTNLGAPAAFKYFDTTIDRKRYTSTKEVLDATLIHQSITGLYETRIDLSQLGGD

SEQ ID NO: 886 - protein, 1255 aa, Artificial Sequence; identical to SEQ ID NO: 885
  Synthetic sequence

SEQ ID NO: 887 - protein, 1226 aa, Artificial Sequence
  Synthetic sequence
MDKKYSIGLDIGTNSVGWAVITDEYKVPSKKFKVLGNTDRHSIKKNLIGALLFDSGETAEATRLKRTARRRYTRRKNRICYLQEIFSNEMAKVDDSFFHRLEESFLVEEDKKHERHPIFGNIVDEVAYHEKYPTIYHLRKKLVDSTDKADLRLIYLALAHMIKFRGHFLIEGDLNPDNSDVDKLFIQLVQTYNQLFEENPINASGVDAKAILSARLSKSRRLENLIAQLPGEKKNGLFGNLIALSLGLTPNFKSNFDLAEDAKLQLSKDTYDDDLDNLLAQIGDQYADLFLAAKNLSDAILLSDILRVNTEITKAPLSASMIKRYDEHHQDLTLLKALVRQQLPEKYKEIFFDQSKNGYAGYIDGGASQEEFYKFIKPILEKMDGTEELLVKLNREDLLRKQRTFDNGSIPHQIHLGELHAILRRQEDFYPFLKDNREKIEKILTFRIPYYVGPLARGNSRFAWMTRKSEETITPWNFEEVVDKGASAQSFIERMTNFDKNLPNEKVLPKHSLLYEYFTVYNELTKVKYVTEGMRKPAFLSGEQKKAIVDLLFKTNRKVTVKQLKEDYFKKIECFDSVEISGVEDRFNASLGTYHDLLKIIKDKDFLDNEENEDILEDIVLTLTLFEDREMIEERLKTYAHLFDDKVMKQLKRRRYTGWGRLSRKLINGIRDKQSGKTILDFLKSDGFANRNFMQLIHDDSLTFKEDIQKAQVSGQGDSLHEHIANLAGSPAIKKGILQTVKVVDELVKVMGRHKPENIVIEMARENQLDKAGFIKRQLVETRQITKHVAQILDSRMNTKYDENDKLIREVKVITLKSKLVSDFRKDFQFYKVREINNYHHAHDAYLNAVVGTALIKKYPKLESEFVYGDYKVYDVRKMIAKSEQEIGKATAKYFFYSNIMNFFKTEITLANGEIRKRPLIETNGETGEIVWDKGRDFATVRKVLSMPQVNIVKKTEVQTGGFSKESILPKRNSDKLIARKKDWDPKKYGGFDSPTVAYSVLVVAKVEKGKSKKLKSVKELLGITIMERSSFEKNPIDFLEAKGYKEVKKDLIIKLPKYSLFELENGRKRMLASAGELQKGNELALPSKYVNFLYLASHYEKLKGSPEDNEQKQLFVEQHKHYLDEIIEQISEFSKRVILADANLDKVLSAYNKHRDKPIREQAENIIHLFTLTNLGAPAAFKYFDTTIDRKRYTSTKEVLDATLIHQSITGLYETRIDLSQLGGD

SEQ ID NO: 888 - protein, 1226 aa, Artificial Sequence; identical to SEQ ID NO: 887
  Synthetic sequence

SEQ ID NO: 889 - protein, 1021 aa, Artificial Sequence
  Synthetic sequence
MDKKYSIGLDIGTNSVGWAVITDEYKVPSKKFKVLGNTDRHSIKKNLIGALLFDSGETAEATRLKRTARRRYTRRKNRICYLQEIFSNEMAKVDDSFFHRLEESFLVEEDKKHERHPIFGNIVDEVAYHEKYPTIYHLRKKLVDSTDKADLRLIYLALAHMIKFRGHFLIEGDLNPDNSDVDKLFIQLVQTYNQLFEENPINASGVDAKAILSARLSKSRRLENLIAQLPGEKKNGLFGNLIALSLGLTPNFKSNFDLAEDAKLQLSKDTYDDDLDNLLAQIGDQYADLFLAAKNLSDAILLSDILRVNTEITKAPLSASMIKRYDEHHQDLTLLKALVRQQLPEKYKEIFFDQSKNGYAGYIDGGASQEEFYKFIKPILEKMDGTEELLVKLNREDLLRKQRTFDNGSIPHQIHLGELHAILRRQEDFYPFLKDNREKIEKILTFRIPYYVGPLARGNSRFAWMTRKSEETITPWNFEEVVDKGASAQSFIERMTNFDKNLPNEKVQLKRRRYTGWGRLSRKLINGIRDKQSGKTILDFLKSDGFANRNFMQLIHDDSLTFKEDIQKAQVSGQGDSLHEHIANLAGSPAIKKGILQTVKVVDELVKVMGRHKPENIVIEMARENTKAERGGLSELDKAGFIKRQLVETRQITKHVAQILDSRMNTKYDENDKLIREVKVITLKSKLVSDFRKDFQFYKVREINNYHHAHDAYLNAVVGTALIKKYPKLESEFVTVRKVLSMPQVNIVKKTEVQTGGFSKESILPKRNSDKLIARKKDWDPKKYGGFDSPTVAYSVLVVAKVEKGKSKKLKSVKELLGITIMERSSFEKNPIDFLEAKGYKEVKKDLIIKLPKYSLFELENGRKRMLASAGELQKGNELALPSKYVNFLYLASHYEKLKGSPEDNEQKQLFVEQHKHYLDEIIEQISEFSKRVILADANLDKVLSAYNKHRDKPIREQAENIIHLFTLTNLGAPAAFKYFDTTIDRKRYTSTKEVLDATLIHQSITGLYETRIDLSQLGGD

SEQ ID NO: 890 - protein, 1021 aa, Artificial Sequence; identical to SEQ ID NO: 889
  Synthetic sequence

SEQ ID NO: 891 - protein, 1019 aa, Artificial Sequence
  Synthetic sequence
MDKKYSIGLDIGTNSVGWAVITDEYKVPSKKFKVLGNTDRHSIKKNLIGALLFDSGETAEATRLKRTARRRYTRRKNRICYLQEIFSNEMAKVDDSFFHRLEESFLVEEDKKHERHPIFGNIVDEVAYHEKYPTIYHLRKKLVDSTDKADLRLIYLALAHMIKFRGHFLIEGDLNPDNSDVDKLFIQLVQTYNQLFEENPINASGVDAKAILSARLSKSRRLENLIAQLPGEKKNGLFGNLIALSLGLTPNFKSNFDLAEDAKLQLSKDTYDDDLDNLLAQIGDQYADLFLAAKNLSDAILLSDILRVNTEITKAPLSASMIKRYDEHHQDLTLLKALVRQQLPEKYKEIFFDQSKNGYAGYIDGGASQEEFYKFIKPILEKMDGTEELLVKLNREDLLRKQRTFDNGSIPHQIHLGELHAILRRQEDFYPFLKDNREKIEKILTFRIPYYVGPLARGNSRFAWMTRKSEETITPWNFEEVVDKGASAQSFIERMTNFDKNLPNEKVVMKQLKRRRYTGWGRLSRKLINGIRDKQSGKTILDFLKSDGFANRNFMQLIHDDSLTFKEDIQKAQVSGQGDSLHEHIANLAGSPAIKKGILQTVKVVDELVKVMGRHKPENIVIEMARENQTTQKGQKNSRERMKRIETRQITKHVAQILDSRMNTKYDENDKLIREVKVITLKSKLVSDFRKDFQFYKVREINNYHHAHDAYLNAVVGTALIKKYPKLESEFVTVRKVLSMPQVNIVKKTEVQTGGFSKESILPKRNSDKLIARKKDWDPKKYGGFDSPTVAYSVLVVAKVEKGKSKKLKSVKELLGITIMERSSFEKNPIDFLEAKGYKEVKKDLIIKLPKYSLFELENGRKRMLASAGELQKGNELALPSKYVNFLYLASHYEKLKGSPEDNEQKQLFVEQHKHYLDEIIEQISEFSKRVILADANLDKVLSAYNKHRDKPIREQAENIIHLFTLTNLGAPAAFKYFDTTIDRKRYTSTKEVLDATLIHQSITGLYETRIDLSQLGGD

SEQ ID NO: 892 - protein, 1019 aa, Artificial Sequence; identical to SEQ ID NO: 891
  Synthetic sequence

SEQ ID NO: 893 - protein, 1006 aa, Artificial Sequence
  Synthetic sequence
MDKKYSIGLDIGTNSVGWAVITDEYKVPSKKFKVLGNTDRHSIKKNLIGALLFDSGETAEATRLKRTARRRYTRRKNRICYLQEIFSNEMAKVDDSFFHRLEESFLVEEDKKHERHPIFGNIVDEVAYHEKYPTIYHLRKKLVDSTDKADLRLIYLALAHMIKFRGHFLIEGDLNPDNSDVDKLFIQLVQTYNQLFEENPINASGVDAKAILSARLSKSRRLENLIAQLPGEKKNGLFGNLIALSLGLTPNFKSNFDLAEDAKLQLSKDTYDDDLDNLLAQIGDQYADLFLAAKNLSDAILLSDILRVNTEITKAPLSASMIKRYDEHHQDLTLLKALVRQQLPEKYKEIFFDQSKNGYAGYIDGGASQEEFYKFIKPILEKMDGTEELLVKLNREDLLRKQRTFDNGSIPHQIHLGELHAILRRQEDFYPFLKDNREKIEKILTFRIPYYVGPLARGNSRFAWMTRKSEETITPWNFEEVVDKGASAQSFIERMTNFDKNLPNEKVLLKRRRYTGWGRLSRKLINGIRDKQSGKTILDFLKSDGFANRNFMQLIHDDSLTFKEDIQKAQVSGQGDSLHEHIANLAGSPAIKKGILQTVKVVDELVKVMGRHKPENIVIEMARENQTTQKGQKTRQITKHVAQILDSRMNTKYDENDKLIREVKVITLKSKLVSDFRKDFQFYKVREINNYHHAHDAYLNAVVGTALIKKYPKLESEFVTVRKVLSMPQVNIVKKTEVQTGGFSKESILPKRNSDKLIARKKDWDPKKYGGFDSPTVAYSVLVVAKVEKGKSKKLKSVKELLGITIMERSSFEKNPIDFLEAKGYKEVKKDLIIKLPKYSLFELENGRKRMLASAGELQKGNELALPSKYVNFLYLASHYEKLKGSPEDNEQKQLFVEQHKHYLDEIIEQISEFSKRVILADANLDKVLSAYNKHRDKPIREQAENIIHLFTLTNLGAPAAFKYFDTTIDRKRYTSTKEVLDATLIHQSITGLYETRIDLSQLGGD

SEQ ID NO: 894 - protein, 1006 aa, Artificial Sequence; identical to SEQ ID NO: 893
  Synthetic sequence

SEQ ID NO: 895 - protein, 927 aa, Artificial Sequence
  Synthetic sequence
MDKKYSIGLDIGTNSVGWAVITDEYKVPSKKFKVLGNTDRHSIKKNLIGALLFDSGETAEATRLKRTARRRYTRRKNRICYLQEIFSNEMAKVDDSFFHRLEESFLVEEDKKHERHPIFGNIVDEVAYHEKYPTIYHLRKKLVDSTDKADLRLIYLALAHMIKFRGHFLIEGDLNPDNSDVDKLFIQLVQTYNQLFEENPINASGVDAKAILSARLSKSRRLENLIAQLPGEKKNGLFGNLIALSLGLTPNFKSNFDLAEDAKLQLSKDTYDDDLDNLLAQIGDQYADLFLAAKNLSDAILLSDILRVNTEITKAPLSASMIKRYDEHHQDLTLLKALVRQQLPEKYKEIFFDQSKNGYAGYIDGGASQEEFYKFIKPILEKMDGTEELLVKLNREDLLRKQRTFDNGSIPHQIHLGELHAILRRQEDFYPFLKDNREKIEKILTFRIPYYVGPLARGNSRFAWMTRKSEETITPWNFEEVVDKGASAQSFIERMTNFDKNLPAQVSGQGDSLHEHIANLAGSPAIKKGILQTVKVVDELVKVMGRHKPENIVIERQITKHVAQILDSRMNTKYDENDKLIREVKVITLKSKLVSDFRKDFQFYKVREINNYHHAHDAYLNAVVGTALIKKYPKLESEFVTVRKVLSMPQVNIVKKTEVQTGGFSKESILPKRNSDKLIARKKDWDPKKYGGFDSPTVAYSVLVVAKVEKGKSKKLKSVKELLGITIMERSSFEKNPIDFLEAKGYKEVKKDLIIKLPKYSLFELENGRKRMLASAGELQKGNELALPSKYVNFLYLASHYEKLKGSPEDNEQKQLFVEQHKHYLDEIIEQISEFSKRVILADANLDKVLSAYNKHRDKPIREQAENIIHLFTLTNLGAPAAFKYFDTTIDRKRYTSTKEVLDATLIHQSITGLYETRIDLSQLGGD

SEQ ID NO: 896 - protein, 927 aa, Artificial Sequence; identical to SEQ ID NO: 895
  Synthetic sequence

SEQ ID NO: 897 - DNA, 20 bp, Artificial Sequence
  Synthetic sequence
aactttcagtttagcggtct

SEQ ID NO: 898 - protein, 801 aa, Streptococcus pyogenes
MDKKYSIGLDIGTNSVGWAVITDEYKVPSKKFKVLGNTDRHSIKKNLIGALLFDSGETAEATRLKRTARRRYTRRKNRICYLQEIFSNEMAKVDDSFFHRLEESFLVEEDKKHERHPIFGNIVDEVAYHEKYPTIYHLRKKLVDSTDKADLRLIYLALAHMIKFRGHFLIEGDLNPDNSDVDKLFIQLVQTYNQLFEENPINASGVDAKAILSARLSKSRRLENLIAQLPGEKKNGLFGNLIALSLGLTPNFKSNFDLAEDAKLQLSKDTYDDDLDNLLAQIGDQYADLFLAAKNLSDAILLSDILRVNTEITKAPLSASMIKRYDEHHQDLTLLKALVRQQLPEKYKEIFFDQSKNGYAGYIDGGASQEEFYKFIKPILEKMDGTEELLVKLNREDLLRKQRTFDNGSIPHQIHLGELHAILRRQEDFYPFLKDNREKIEKILTFRIPYYVGPLARGNSRFAWMTRKSEETITPWNFEEVVDKGASAQSFIERMTNFDKNLPNEKVLPKHSLLYEYFTVYNELTKVKYVTEGMRKPAFLSGEQKKAIVDLLFKTNRKVTVKQLKEDYFKKIECFDSVEISGVEDRFNASLGTYHDLLKIIKDKDFLDNEENEDILEDIVLTLTLFEDREMIEERLKTYAHLFDDKVMKQLKRRRYTGWGRLSRKLINGIRDKQSGKTILDFLKSDGFANRNFMQLIHDDSLTFKEDIQKAQVSGQGDSLHEHIANLAGSPAIKKGILQTVKVVDELVKVMGRHKPENIVIEMARENQTTQKGQKNSRERMKRIEEGIKELGSQILKEHPV

SEQ ID NO: 899 - protein, 471 aa, Artificial Sequence
  Synthetic sequence
MDKKYSIGLAIGTNSVGWAVITDEYKVPSKKFKVLGNTDRHSIKKNLIGALLFDSGETAEATRLKRTARRRYTRRKNRICYLQEIFSNEMAKVDDSFFHRLEESFLVEEDKKHERHPIFGNIVDEVAYHEKYPTIYHLRKKLVDSTDKADLRLIYLALAHMIKFRGHFLIEGDLNPDNSTSDAILLSDILRVNTEITKAPLSASMIKRYDEHHQDLTLLKALVRQQLPEKYKEIFFDQSKNGYAGYIDGGASQEEFYKFIKPILEKMDGTEELLVKLNREDLLRKQRTFDNGSIPHQIHLGELHAILRRQEDFYPFLKDNREKIEKILTFRIPYYVGPLARGNSRFAWMTRKSEETITPWNFEEVVDKGASAQSFIERMTNFDKNLTSQKAQVSGQGDSLHEHIANLAGSPAIKKGILQTVKVVDELVKVMGRHKPENIVIEMARENQTTQKGQKNSRERMKRIEEGIKEL

SEQ ID NO: 900 - protein, 567 aa, Streptococcus pyogenes
ENTQLQNEKLYLYYLQNGRDMYVDQELDINRLSDYDVDHIVPQSFLKDDSIDNKVLTRSDKNRGKSDNVPSEEVVKKMKNYWRQLLNAKLITQRKFDNLTKAERGGLSELDKAGFIKRQLVETRQITKHVAQILDSRMNTKYDENDKLIREVKVITLKSKLVSDFRKDFQFYKVREINNYHHAHDAYLNAVVGTALIKKYPKLESEFVYGDYKVYDVRKMIAKSEQEIGKATAKYFFYSNIMNFFKTEITLANGEIRKRPLIETNGETGEIVWDKGRDFATVRKVLSMPQVNIVKKTEVQTGGFSKESILPKRNSDKLIARKKDWDPKKYGGFDSPTVAYSVLVVAKVEKGKSKKLKSVKELLGITIMERSSFEKNPIDFLEAKGYKEVKKDLIIKLPKYSLFELENGRKRMLASAGELQKGNELALPSKYVNFLYLASHYEKLKGSPEDNEQKQLFVEQHKHYLDEIIEQISEFSKRVILADANLDKVLSAYNKHRDKPIREQAENIIHLFTLTNLGAPAAFKYFDTTIDRKRYTSTKEVLDATLIHQSITGLYETRIDLSQLGGD

SEQ ID NO: 901 - protein, 403 aa, Artificial Sequence
  Synthetic sequence
ASDNLTKAERGGLSELDKAGFIKRQLVETRQITKHVAQILDSRMNTKYDENDKLIREVKVITLKSKLVSDFRKDFQFYKVREINNYHHAHDAYLNAVVGTALIKKYPKLESEFVASTVRKVLSMPQVNIVKKTEVQTGGFSKESILPKRNSDKLIARKKDWDPKKYGGFDSPTVAYSVLVVAKVEKGKSKKLKSVKELLGITIMERSSFEKNPIDFLEAKGYKEVKKDLIIKLPKYSLFELENGRKRMLASAGELQKGNELALPSKYVNFLYLASHYEKLKGSPEDNEQKQLFVEQHKHYLDEIIEQISEFSKRVILADANLDKVLSAYNKHRDKPIREQAENIIHLFTLTNLGAPAAFKYFDTTIDRKRYTSTKEVLDATLIHQSITGLYETRIDLSQLGGD

What is claimed is:

1. An RNA-guided effector polypeptide having a length of from about 610 amino acids to about 1310 amino acids, wherein the RNA-guided effector polypeptide comprises one or more of:
i) a deletion of from 5 contiguous amino acids to 158 contiguous amino acids of amino acids 166-324;
ii) a deletion of from 30 contiguous amino acids to 255 contiguous amino acids of amino acids 484-739;
iii) a deletion of from 4 contiguous amino acids to 220 contiguous amino acids of amino acids 761-981; and
d) a deletion of from 20 contiguous amino acids to 118 contiguous amino acids of amino acids 994-1112,
wherein the amino acid numbering is based on SEQ ID NO:5.

2. The RNA-guided effector polypeptide of claim 1, wherein the RNA-guided effector polypeptide comprises a deletion of from 5 contiguous amino acids to 158 contiguous amino acids of amino acids 166-324.

3. The RNA-guided effector polypeptide of claim 1, wherein the RNA-guided effector polypeptide comprises a deletion of from 30 contiguous amino acids to 255 contiguous amino acids of amino acids 484-739.

4. The RNA-guided effector polypeptide of claim 1, wherein the RNA-guided effector polypeptide comprises a deletion of from 4 contiguous amino acids to 220 contiguous amino acids of amino acids 761-981.

5. The RNA-guided effector polypeptide of claim 1, wherein the RNA-guided effector polypeptide comprises a deletion of from 20 contiguous amino acids to 118 contiguous amino acids of amino acids 994-1112.

6. The RNA-guided effector polypeptide of claim 1, wherein the RNA-guided effector polypeptide comprises:
i) a deletion of from 5 contiguous amino acids to 158 contiguous amino acids of amino acids 166-324; and
ii) a deletion of from 30 contiguous amino acids to 255 contiguous amino acids of amino acids 484-739.

7. The RNA-guided effector polypeptide of claim 1, wherein the RNA-guided effector polypeptide comprises:
i) a deletion of from 5 contiguous amino acids to 158 contiguous amino acids of amino acids 166-324; and
ii) a deletion of from 4 contiguous amino acids to 220 contiguous amino acids of amino acids 761-981.

8. The RNA-guided effector polypeptide of claim 1, wherein the RNA-guided effector polypeptide comprises:
i) a deletion of from 5 amino acids to 158 amino acids of amino acids 166-324; and
ii) a deletion of from 20 amino acids to 118 amino acids of amino acids 994-1112.

9. The RNA-guided effector polypeptide of claim 1, wherein the RNA-guided effector polypeptide comprises:
i) a deletion of from 5 contiguous amino acids to 158 contiguous amino acids of amino acids 166-324;
ii) a deletion of from 30 contiguous amino acids to 255 contiguous amino acids of amino acids 484-739; and
iii) a deletion of from 4 contiguous amino acids to 220 contiguous amino acids of amino acids 761-981.

10. The RNA-guided effector polypeptide of claim 1, wherein the RNA-guided effector polypeptide comprises:
i) a deletion of from 5 contiguous amino acids to 158 contiguous amino acids of amino acids 166-324;
ii) a deletion of from 30 contiguous amino acids to 255 contiguous amino acids of amino acids 484-739; and
iii) a deletion of from 20 contiguous amino acids to 118 contiguous amino acids of amino acids 994-1112.

11. The RNA-guided effector polypeptide of claim 1, wherein the RNA-guided effector polypeptide comprises:
i) a deletion of from 5 contiguous amino acids to 158 contiguous amino acids of amino acids 166-324;
ii) a deletion of from 30 contiguous amino acids to 255 contiguous amino acids of amino acids 484-739;
iii) a deletion of from 4 contiguous amino acids to 220 contiguous amino acids of amino acids 761-981; and
iv) a deletion of from 20 contiguous amino acids to 118 contiguous amino acids of amino acids 994-1112.

12. The RNA-guided effector polypeptide of claim 1, wherein the RNA-guided effector polypeptide comprises:
i) a deletion of from 30 contiguous amino acids to 255 contiguous amino acids of amino acids 484-739; and
ii) a deletion of from 4 contiguous amino acids to 220 contiguous amino acids of amino acids 761-981.

13. The RNA-guided effector polypeptide of claim 1, wherein the RNA-guided effector polypeptide comprises:
i) a deletion of from 30 contiguous amino acids to 255 contiguous amino acids of amino acids 484-739; and
ii) a deletion of from 20 contiguous amino acids to 118 contiguous amino acids of amino acids 994-1112.

14. The RNA-guided effector polypeptide of claim 1, wherein the RNA-guided effector polypeptide comprises:
i) a deletion of from 30 contiguous amino acids to 255 contiguous amino acids of amino acids 484-739;
ii) a deletion of from 4 contiguous amino acids to 220 contiguous amino acids of amino acids 761-981; and
iii) a deletion of from 20 contiguous amino acids to 118 contiguous amino acids of amino acids 994-1112.

15. The RNA-guided effector polypeptide of claim 1, wherein the RNA-guided effector polypeptide comprises:
i) a deletion of from 4 contiguous amino acids to 220 contiguous amino acids of amino acids 761-981; and
ii) a deletion of from 20 contiguous amino acids to 118 contiguous amino acids of amino acids 994-1112.

16. The RNA-guided effector polypeptide of claim 1, wherein the RNA-guided effector polypeptide comprises a deletion of amino acids 179-296 based on the number of SEQ ID NO:5.

17. The RNA-guided effector polypeptide of claim 1, wherein the RNA-guided effector polypeptide comprises a deletion of amino acids 503-708 based on the number of SEQ ID NO:5.

18. The RNA-guided effector polypeptide of claim 1, wherein the RNA-guided effector polypeptide comprises a deletion of amino acids 792-897 based on the number of SEQ ID NO:5.

19. The RNA-guided effector polypeptide of claim 1, wherein the RNA-guided effector polypeptide comprises a deletion of amino acids 1010-1081 based on the number of SEQ ID NO:5.

20. The RNA-guided effector polypeptide of claim 1, wherein the RNA-guided effector polypeptide comprises:
i) a deletion of amino acids 503-708 based on the number of SEQ ID NO:5;
ii) a deletion of amino acids 792-897 based on the number of SEQ ID NO:5; and
iii) a deletion of amino acids 1010-1081 based on the number of SEQ ID NO:5.

21. The RNA-guided effector polypeptide of claim 1, wherein the RNA-guided effector polypeptide comprises:
i) a deletion of amino acids 179-296 based on the number of SEQ ID NO:5;
ii) a deletion of amino acids 503-708 based on the number of SEQ ID NO:5;
iii) a deletion of amino acids 792-897 based on the number of SEQ ID NO:5; and
iv) a deletion of amino acids 1010-1081 based on the number of SEQ ID NO:5.

22. The RNA-guided effector polypeptide of claim 1, wherein the polypeptide comprises an amino acid sequence having at least 85% amino acid sequence identity to the amino acid sequence depicted in FIG. 2, wherein the RNA-guided effector polypeptide is 990 amino acids in length.

23. The RNA-guided effector polypeptide of claim 1, wherein the polypeptide comprises an amino acid sequence having at least 85% amino acid sequence identity to the amino acid sequence depicted in FIG. 3, wherein the RNA-guided effector polypeptide is 874 amino acids in length.

24. A nucleic acid comprising a nucleotide sequence encoding the RNA-guided effector polypeptide of any one of claims 1-23.

25. The nucleic acid of claim 24, wherein the nucleotide sequence is operably linked to a transcriptional control element.

26. The nucleic acid of claim 25, wherein the transcriptional control element is a promoter.

27. The nucleic acid of claim 26, wherein the promoter is a regulatable promoter.

28. The nucleic acid of claim 27, wherein the promoter is functional in a eukaryotic cell.

29. The nucleic acid of any one of claims 24-28, further comprising a nucleotide sequence encoding a guide RNA, wherein the guide RNA comprises a guide sequence that is complementary to a target sequence of a target nucleic acid, and comprises a region that can bind to the RNA-guided effector polypeptide.

30. A recombinant expression vector comprising the nucleic acid of any one of claims 24-29.

31. The recombinant expression vector of claim 30, wherein the recombinant expression vector is recombinant viral expression vector.

32. A fusion polypeptide comprising:
a) the RNA-guided effector polypeptide of any one of claims 1-23; and
b) a heterologous fusion partner.

33. The fusion polypeptide of claim 32, wherein the heterologous fusion partner provides for control of gene expression.

34. The fusion polypeptide of claim 32, wherein the heterologous fusion partner is a protein-modifying enzyme.

35. The fusion polypeptide of claim 32, wherein the heterologous fusion partner is a modifying enzyme is a DNA-modifying enzyme.

36. The fusion polypeptide of claim 32, wherein the heterologous fusion partner exhibits nuclease activity.

37. The fusion polypeptide of claim 36, wherein the nuclease activity is double-stranded DNA cleavage activity.

38. The fusion polypeptide of claim 37, wherein the heterologous fusion partner comprises an amino acid sequence having at least 85% amino acid sequence identity to the catalytic domain of the amino acid sequence depicted in FIG. 2A and has a length of no more than 200 amino acids.

39. The fusion polypeptide of any one of claims 32-38, wherein the fusion partner has a length of no more than 400 amino acids.

40. The fusion polypeptide of claim 35, wherein the heterologous fusion partner is a base editor.

41. The fusion polypeptide of claim 40, wherein the base editor is a cytidine deaminase.

42. The fusion polypeptide of claim 40, wherein the base editor is an adenosine deaminase.

43. The fusion polypeptide of claim 32, further comprising one or more nuclear localization sequences (NLS).

44. The fusion polypeptide of claim 43, wherein the fusion polypeptide comprises a single NLS.

45. The fusion polypeptide of claim 43, wherein the fusion polypeptide comprises 2 or more NLSs.

46. The fusion polypeptide of claim 43, wherein the fusion polypeptide comprises an NLS at the C-terminus, at the N-terminus, or at the C-terminus and the N-terminus, of the fusion polypeptide.

47. The fusion polypeptide of claim 32, further comprising an endosomolytic peptide.

48. A nucleic acid comprising a nucleotide sequence encoding the fusion polypeptide of any one of claims 32-47.

49. The nucleic acid of claim 48, wherein the nucleotide sequence is operably linked to a transcriptional control element.

50. The nucleic acid of claim 49, wherein the transcriptional control element is a promoter.

51. The nucleic acid of claim 50, wherein the promoter is a regulatable promoter.

52. The nucleic acid of claim 50 or claim 51, wherein the promoter is functional in a eukaryotic cell.

53. The nucleic acid of any one of claims 48-52, further comprising a nucleotide sequence encoding a guide RNA, wherein the guide RNA comprises a guide sequence that is complementary to a target sequence of a target nucleic acid, and comprises a region that can bind to the RNA-guided effector polypeptide.

54. A recombinant expression vector comprising the nucleic acid of any one of claims 48-53.

55. The recombinant expression vector of claim 54, wherein the recombinant expression vector is recombinant viral expression vector.

56. A ribonucleoprotein (RNP) complex comprising:
a) the fusion polypeptide of claim 32; and
b) a guide RNA, or a nucleic acid encoding the guide RNA, wherein the guide RNA comprises a guide sequence that is complementary to a target sequence of a target nucleic acid, and comprises a region that can bind to the RNA-guided effector polypeptide.

57. The RNP complex of claim 56, wherein the guide RNA is a single-molecule guide RNA.

58. A composition comprising:
a) the RNP complex of claim 56 or claim 57; and
b) a pharmaceutically acceptable excipient.

59. The composition of claim 58, comprising a lipid.

60. The composition of claim 58, comprising a liposome, a hydrogel, a microparticle, a nanoparticle, or a block copolymer micelle.

61. A kit comprising:
a) the RNA-guided effector polypeptide of claim 1, or the fusion polypeptide of claim 32; and
b) a guide RNA, or a nucleic acid encoding the guide RNA, wherein the guide RNA comprises a guide sequence that is complementary to a target sequence of a target nucleic acid, and comprises a region that can bind to the RNA-guided effector polypeptide.

62. The kit of claim 61, wherein the guide RNA is a single-molecule guide RNA.

63. The kit of claim 61 or 62, wherein the RNA-guided effector polypeptide and the guide RNA are in separate containers.

64. The kit of claim 61 or 62, wherein the RNA-guided effector polypeptide and the guide RNA are together in a single container.

65. The kit of any one of claims 61-64, wherein the guide RNA comprises one or more of: a modified nucleobase, a modified backbone or non-natural internucleoside linkage, a modified sugar moiety, a Locked Nucleic Acid, a Peptide Nucleic Acid, and a deoxyribonucleotide.

66. The kit of any one of claims 61-65, further comprising a donor nucleic acid template.

67. A method of binding and/or modifying a target nucleic acid and/or modifying a polypeptide that binds to a target nucleic acid, the method comprising contacting the target nucleic acid with:
i) the RNA-guided effector polypeptide of any one of claims 1-23; or
ii) the fusion polypeptide of any one of claims 32-47.

68. The method of claim 67, wherein the target nucleic acid is selected from: double stranded DNA, single stranded DNA, RNA, genomic DNA, and extrachromosomal DNA.

69. The method of claim 67, wherein contacting results in genome editing.

70. The method of claim 67 or 68, wherein said contacting takes place outside of a bacterial cell and outside of an archaeal cell.

71. The method of any one of claims 67-69, wherein said contacting takes place in vitro outside of a cell.

72. The method of any one of claims 67-69, wherein said contacting takes place inside of a target cell.

73. The method of claim 72, wherein the target cell is a eukaryotic cell.

74. The method of claim 72 or 73, wherein the target cell is in vivo.

75. The method of claim 72 or 73, wherein the target cell is ex vivo.

76. The method of claim 72 or 73, wherein the eukaryotic cell is selected from the group consisting of: a plant cell, a fungal cell, a single cell eukaryotic organism, a mammalian cell, a reptile cell, an insect cell, an avian cell, a fish cell, a parasite cell, an arthropod cell, a cell of an invertebrate, a cell of a vertebrate, a rodent cell, a mouse cell, a rat cell, a primate cell, a non-human primate cell, and a human cell.

77. The method of any one of claims 72-76, wherein said contacting further comprises: introducing a DNA donor template into the target cell.
